(19) United States
(12) Patent Application Publication
(10) Pub. No.: US 2007/0111311 A1
(43) Pub. Date: May 17, 2007

(54) Plant cells and plants with increased tolerance to environmental stress

(75) Inventors: Piotr Puzio, Berlin (DE); Agnes Chardonnens, Berlin (DE); Ruoying Chen, Apex, NC (US); Pilar Puente, Durham, NC (US)

Correspondence Address: CONNOLLY BOVE LODGE & HUTZ, LLP, P O BOX 2207, WILMINGTON, DE, 19899, US

(73) Assignee: BASF Plant Science GmbH, Ludwigshafen (DE)

(21) Appl. No.: 11/250,779

(22) Filed: Oct. 14, 2005

Related U.S. Application Data
(63) Continuation-in-part of application No. PCT/US04/11887, filed on Apr. 15, 2004.

(30) Foreign Application Priority Data
Apr. 15, 2003 (EP) 03008079.0
Aug. 1, 2003 (EP) 03016671.4
Sep. 30, 2003 (EP) 03022226.9

(51) Int. Cl. C12N 15/82; C12N 15/29; C07H 21/02

(52) U.S. Cl. 435/419; 800/298; 800/285; 536/23.1; 530/370; 530/387.1

(57) ABSTRACT

This invention relates generally to transformed plant cells and plants comprising an inactivated or down-regulated gene resulting in increased tolerance and/or resistance to environmental stress as compared to non-transformed wild type cells and methods of producing such plant cells or plants. This invention further relates generally to transformed plant cells with altered metabolic activity compared to a corresponding non-transformed wild type plant cell, wherein the metabolic activity is altered by an inactivated or down-regulated gene and results in increased tolerance and/or resistance to an environmental stress as compared to a corresponding non transformed wild type plant cell, methods of producing, screening for and breeding such plant cells or plants and method of detecting stress in plants cells or plants.

[0001] This application is a continuation-in-part of international application PCT/US2004/011887 filed Apr. 15, 2004 which claims benefit to European application 03008079.0 filed Apr. 15, 2003, European application 03016671.4 filed Aug. 1, 2003, and European application 03022226.9 filed Sep. 30, 2003 each of which is incorporated by reference herein in its entirety for all useful purposes.

[0002] This invention relates generally to transformed plant cells and plants comprising an inactivated or down-regulated gene resulting in increased tolerance and/or resistance to environmental stress as compared to non-transformed wild type cells and methods of producing such plant cells or plants.

[0003] This invention further relates generally to transformed plant cells with altered metabolic activity compared to a corresponding non transformed wild type plant cell, wherein the metabolic activity is altered by an inactivated or down-regulated gene and results in increased tolerance and/or resistance to an environmental stress as compared to a corresponding non-transformed wild type plant cell, methods of producing, screening for and breeding such plant cells or plants and method of detecting stress in plants cells or plants.

[0004] In particular, this invention relates to transformed plant cells and plants comprising an inactivated or down-regulated gene resulting in increased tolerance and/or resistance to environmental stress, especially by altering the metabolic activity, as compared to non-transformed wild type cells and methods of producing such plant cells or plants.

[0005] Abiotic environmental stress, such as drought stress, salinity stress, heat stress, and cold stress, is a major limiting factor of plant growth and productivity (Boyer. 1982. Science 218, 443-448). Crop losses and crop yield losses of major crops such as rice, maize (corn) and wheat caused by these stresses represent a significant economic and political factor and contribute to food shortages in many underdeveloped and third-world countries.

[0006] Plants are typically exposed during their life cycle to conditions of reduced environmental water content. Most plants have evolved strategies to protect themselves against these conditions of low water or desiccation (drought) for short period of time. However, if the severity and duration of the drought conditions are too great, the effects on plant development, growth and yield of most crop plants are profound. Continuous exposure to drought causes major alterations in the plant metabolism. These great changes in metabolism ultimately lead to cell death and consequently yield losses.

[0007] Developing stress-tolerant and/or resistant plants is a strategy that has the potential to solve or mediate at least some of these problems (McKersie and Leshem, 1994. Stress and Stress Coping in Cultivated Plants, Kluwer Academic Publishers). However, traditional plant breeding strategies to develop new lines of plants that exhibit resistance (tolerance) to these types of stress are relatively slow and require specific resistant lines for crossing with the desired line. Limited germplasm resources for stress tolerance and incompatibility in crosses between distantly related plant species represent significant problems encountered in conventional breeding. Additionally, the cellular processes leading to drought, cold and salt tolerance and/or resistance are complex in nature and involve multiple mechanisms of cellular adaptation and numerous metabolic pathways (McKersie and Leshem, 1994. Stress and Stress Coping in Cultivated Plants, Kluwer Academic Publishers). This multi-component nature of stress tolerance and/or resistance has not only made breeding for tolerance and/or resistance largely unsuccessful, but has also limited the ability to genetically engineer stress tolerance plants using biotechnological methods.

[0008] Drought, heat, cold and salt stress have a common theme important for plant growth and that is water availability. Plants are exposed during their entire life cycle to conditions of reduced environmental water content. Most plants have evolved strategies to protect themselves against lack of water. However, if the severity and duration of the drought conditions are too great, the effects on plant development, growth and yield of most crop plants are profound. Since high salt content in some soils result in less available water for cell intake, its effect is similar to those observed under drought conditions. Likewise, under freezing temperatures, plant cells loose water as a result of ice formation that starts in the apoplast and withdraws water from the symplast (McKersie and Leshem, 1994. Stress and Stress Coping in Cultivated Plants, Kluwer Academic Publishers). Commonly, a plant's molecular response mechanisms to each of these stress conditions are the same.

[0009] The results of current research indicate that drought tolerance and/or resistance is a complex quantitative trait and that no real diagnostic marker is available yet. High salt concentrations or dehydration may cause damage at the cellular level during drought stress but the precise injury is not entirely clear (Bray, 1997. Trends Plant Sci. 2, 48-54). This lack of a mechanistic understanding makes it difficult to design a transgenic approach to improve drought tolerance and/or resistance. However, an important consequence of damage may be the production of reactive oxygen radicals that cause cellular injury, such as lipid peroxidation or protein and nucleic acid modification. Details of oxygen free radical chemistry and their reaction with cellular components such as cell membranes have been described (McKersie and Leshem, 1994. Stress and Stress Coping in Cultivated Plants, Kluwer Academic Publishers).

[0010] There are numerous sites of oxygen activation in the plant cell, which are highly controlled and tightly coupled to prevent release of intermediate products (McKersie and Leshem, 1994. Stress and Stress Coping in Cultivated Plants, Kluwer Academic Publishers). Under abiotic stress situations, it is likely that this control or coupling breaks down and the process “dysfunctions” leaking activated oxygen. These uncoupling events are not detrimental provided that they are short in duration and that the oxygen scavenging systems are able to detoxify the various forms of activated oxygen. If the production of activated oxygen exceeds the plant's capacity to detoxify it, deleterious degenerative reactions occur. At the subcellular level, disintegration of membranes and aggregation of proteins are typical symptoms. Therefore it is the balance between the production and the scavenging of activated oxygen that is critical to the maintenance of active growth and metabolism of the plant and overall environmental (abiotic) stress tolerance and/or resistance.

[0011] Preventing or diminishing the accumulation of oxygen free radicals in response to drought is a potential way to engineer tolerance (Allen, 1995. Plant Physiol. 107, 1049-1054). Overexpression of antioxidant enzymes or ROS-scavenging enzymes is one possibility for the induction of functional detoxification systems. For example, transgenic alfalfa plants expressing Mn-superoxide dismutase tend to have reduced injury after water-deficit stress (McKersie et al., 1996. Plant Physiol. 111, 1177-1181). These same transgenic plants have increased biomass production in field trials (McKersie et al., 1999. Plant Physiology, 119: 839-847; McKersie et al., 1996. Plant Physiol. 111, 1177-1181). Transgenic plants that overproduce osmolytes such as mannitol, fructans, proline or glycine-betaine also show increased resistance to some forms of abiotic stress and it is proposed that the synthesized osmolytes act as ROS scavengers (Tarczynski. et al. 1993 Science 259, 508-510; Sheveleva, et al. 1997. Plant Physiol. 115, 1211-1219).

[0012] It is the object of this invention to identify new, unique genes capable of conferring stress tolerance to plants upon inactivation or down-regulation of genes.

[0013] It is further object of this invention to identify, produce and breed new, unique stress tolerant and/or resistant plant cells or plants and methods of inducing and detecting stress tolerance and/or resistance in plants or plant cells. It is a further object to identify new methods to detect stress tolerance and/or resistance in plants or plant cells.

[0014] It is also the object of this invention to identify new, unique genes capable of conferring stress tolerance to plants, which is preferably achieved by altering metabolic activity, upon inactivated or down-regulated genes

[0015] The present invention provides a transformed plant cell with altered metabolic activity compared to a corresponding non transformed wild type plant cell, wherein the metabolic activity is altered by an inactivated or down-regulated gene and results in increased tolerance and/or resistance to an environmental stress as compared to a corresponding non-transformed wild type plant cell.

[0016] As used herein, the term “metabolite” refers to intermediate substances, preferably such of low molecular weight, which occur during anabolism and catabolism in a cell or plant.

[0017] The term “altered metabolic activity” refers to the change (increase oe decrease) of the amount, concentration or activity (meaning here the effective concentration for the purposes of chemical reactions and other mass action) of a metabolite in a specific volume relative to a corresponding volume (e.g. in an organism, a tissue, a cell or a cell compartment) of a control, reference or wild type, measured for example by one of the methods described herein below, which is changed (increased or decreased) as compared to a corresponding non transformed wild type plant cell.

[0018] As used herein, the term “inactivated or down-regulated gene” means the transgenic reduction or deletion of the expression of nucleic acid of FIG. 1a, 1b, 1c or 1d leading to an altered metabolic activity and which results in increased tolerance and/or resistance to an environmental stress as compared to a corresponding non-transformed wild type plant cell.

[0019] In the transgenic plant cell of the invention, the reduction or deletion of the expression of said nucleic acid results in increased tolerance to an environmental stress, which is preferably achieved by altering metabolic activity, as compared to a corresponding non-transformed wild type plant cell. Herein, the environmental stress is selected from the group consisting of salinity, drought, temperature, metal, chemical, pathogenic and oxidative stresses, or combinations thereof, preferably drought and/or temperature.

[0020] The term “expression” refers to the transcription and/or translation of a codogenic gene segment or gene. As a rule, the resulting product is an mRNA or a protein. However, expression products can also include functional RNAs such as, for example, antisense, nucleic acids, tRNAs, snRNAs, rRNAs, RNAi, siRNA, ribozymes etc. Expression may be systemic, local or temporal, for example limited to certain cell types, tissues organs or time periods.

[0021] Unless otherwise specified, the terms “polynucleotides”, “nucleic acid” and “nucleic acid molecule” are interchangeably in the present context. Unless otherwise specified, the terms “peptide”, “polypeptide” and “protein” are interchangeably in the present context. The term “sequence” may relate to polynucleotides, nucleic acids, nucleic acid molecules, peptides, polypeptides and proteins, depending on the context in which the term “sequence” is used. The terms “gene(s)”, “polynucleotide”, “nucleic acid sequence”, “nucleotide sequence”, or “nucleic acid molecule(s)” as used herein refers to a polymeric form of nucleotides of any length, either ribonucleotides or deoxyribonucleotides. The terms refer only to the primary structure of the molecule.

[0022] Thus, the terms “gene(s)”, “polynucleotide”, “nucleic acid sequence”, “nucleotide sequence”, or “nucleic acid molecule(s)” as used herein include double- and single-stranded DNA and RNA. They also include known types of modifications, for example, methylation, “caps”, substitutions of one or more of the naturally occurring nucleotides with an analog. Preferably, the DNA or RNA sequence of the invention comprises a coding sequence encoding the herein defined polypeptide.

[0023] A “coding sequence” is a nucleotide sequence, which is transcribed into mRNA and/or translated into a polypeptide when placed under the control of appropriate regulatory sequences. The boundaries of the coding sequence are determined by a translation start codon at the 5′-terminus and a translation stop codon at the 3′-terminus. A coding sequence can include, but is not limited to mRNA, cDNA, recombinant nucleotide sequences or genomic DNA, while introns may be present as well under certain circumstances.

[0024] For the purposes of the invention, as a rule the plural is intended to encompass the singular and vice versa.

[0025] The terms “reduction”, “decrease” or “deletion” relate to a corresponding change of a property in an organism, a part of an organism such as a tissue, seed, root, leave, flower etc. or in a cell. Under “change of a property” it is understood that the activity, expression level or amount of a gene product or the metabolite content is changed in a specific volume or in a specific amount of protein relative to a corresponding volume or amount of protein of a control, reference or wild type. Preferably, the overall activity in the volume is reduced, decreased or deleted in cases if the reduction, decrease or deletion is related to the reduction, decrease or deletion of an activity of a gene product, independent whether the amount of gene product or the specific activity of the gene product or both is reduced, decreased or deleted or whether the amount, stability or translation efficacy of the nucleic acid sequence or gene encoding for the gene product is reduced, decreased or deleted.

[0026] The terms “reduction”, “decrease” or “deletion” include the change of said property in only parts of the subject of the present invention, for example, the modification can be found in compartment of a cell, like an organelle, or in a part of a plant, like tissue, seed, root, leave, flower etc. but is not detectable if the overall subject, i.e. complete cell or plant, is tested. Preferably, the “reduction”, “decrease” or “deletion” is found cellular, thus the term “reduction, decrease or deletion of an activity” or “reduction, decrease or deletion of a metabolite content” relates to the cellular reduction, decrease or deletion compared to the wild type cell. In addition the terms “reduction”, “decrease” or “deletion” include the change of said property only during different growth phases of the organism used in the inventive process, for example the reduction, decrease or deletion takes place only during the seed growth or during blooming. Furthermore the terms include a transitional reduction, decrease or deletion for example because the used RNAi is not stable integrated in the genome of the organism and has therefore only a transient effect.

[0027] Accordingly, the term “reduction”, “decrease” or “deletion” means that the specific activity of an enzyme or other protein or regulatory RNA as well as the amount of a compound or metabolite, e.g. of a polypeptide, a nucleic acid molecule or the fine chemical of the invention or an encoding mRNA or DNA, can be reduced, decreased or deleted in a volume.

[0028] The terms “wild type”, “control” or “reference” are exchangeable and can be a cell or a part of organisms such as an organelle or tissue, or an organism, in particular a microorganism or a plant, which was not modified or treated according to the herein described process according to the invention. Accordingly, the cell or a part of organisms such as an organelle or a tissue, or an organism, in particular a microorganism or a plant used as wild type, control or reference corresponds to the cell, organism or part thereof as much as possible and is in any other property but in the result of the process of the invention as identical to the subject matter of the invention as possible. Thus, the wild type, control or reference is treated identically or as identical as possible, saying that only conditions or properties might be different which do not influence the quality of the tested property.

[0029] Preferably, any comparison is carried out under analogous conditions. The term “analogous conditions” means that all conditions such as, for example, culture or growing conditions, assay conditions (such as buffer composition, temperature, substrates, pathogen strain, concentrations and the like) are kept identical between the experiments to be compared.

[0030] The “reference”, “control”, or “wild type” is preferably a subject, e.g. an organelle, a cell, a tissue, an organism, in particular a plant or a microorganism, which was not modified or treated according to the herein described process of the invention and is in any other property as similar to the subject matter of the invention as possible. The reference, control or wild type is in its genome, transcriptome, proteome or metabolome as similar as possible to the subject of the present invention. Preferably, the term “reference-” “control-” or “wild type-”-organelle, -cell, -tissue or -organism, in particular plant or microorganism, relates to an organelle, cell, tissue or organism, in particular plant or microorganism, which is nearly genetically identical to the organelle, cell, tissue or organism, in particular microorganism or plant, of the present invention or a part thereof preferably 95%, more preferred are 98%, even more preferred are 99.00%, in particular 99.10%, 99.30%, 99.50%, 99.70%, 99.90%, 99.99%, 99.999% or more. Most preferable the “reference”, “control”, or “wild type” is preferably a subject, e.g. an organelle, a cell, a tissue, an organism, which is genetically identical to the organism, cell organelle used according to the process of the invention except that nucleic acid molecules or the gene product encoded by them are changed according to the inventive process.

[0031] Preferably, the reference, control or wild type differs form the subject of the present invention only in the cellular activity of the polypeptide or RNA of the invention, e.g. as result of a reduction, decrease or deletion in the level of the nucleic acid molecule of the present invention or a reduction, decrease or deletion of the specific activity of the polypeptide or RNA of the invention, e.g. by or in the expression level or activity of protein or RNA that means its biological activity and/or its biochemical or genetical causes.

[0032] The term “expression” means the transcription of a gene into structural RNA (rRNA, tRNA, miRNA) or messenger RNA (mRNA) with the subsequent translation of the latter into a protein. Experimentally, expression can be detected by e.g. Northern, qRT PCR, transcriptional run-on assays or Western blotting and other immuno assays. As consequence of the reduction, decrease or deletion of the expression that means as consequence of the reduced, decreased or deleted transcription of a gene a related phenotypic trait appears such as the enhanced or increased stress tolerance.

[0033] Accordingly, preferred reference subject is the starting subject of the present process of the invention. Preferably, the reference and the subject matter of the invention are compared after standardization and normalization, e.g. to the amount of total RNA, DNA, or Protein or activity or expression of reference genes, like housekeeping genes, such as ubiquitin.

[0034] A series of mechanisms exists via which a modification in the polypeptide of the invention can directly or indirectly affect stress tolerance. For example, the molecule number or the specific activity of the polypeptide of the invention or the number of expression of the nucleic acid molecule of the invention may be reduced, decreased or deleted. However, it is also possible to reduce, decrease or delete the expression of the gene which is naturally present in the organisms, for example by modifying the regulation of the gene, or by reducing or decreasing the stability of the mRNA or of the gene product encoded by the nucleic acid molecule of the invention.

[0035] This also applies analogously to the combined reduction, decrease or deletion of the expression of the nucleic acid molecule of the present invention or its gene product together with the manipulation of further activities such as enzymes which confer stress tolerance.

[0036] The reduction, decrease, deletion or modulation according to this invention can be constitutive, e.g. due to a stable permanent transgenic expression or to a stable mutation in the corresponding endogenous gene encoding the nucleic acid molecule of the invention or to a modulation of the expression or of the behaviour of a gene conferring the expression of the polypeptide of the invention, or transient, e.g. due to an transient transformation, a transiently active promoter or temporary addition of a modulator such as an antagonist or inductor, e.g. after transformation with a inducible construct carrying a double-stranded RNA nucleic acid molecule, an antisense nucleic acid molecule, a ribozyme of the invention etc. under control of a inducible promoter and adding the inducer, e.g. tetracycline or as described herein below.

[0037] The reduction, decrease or deletion in activity amounts preferably by at least 10%, preferably by at least 30% or at least 60%, especially preferably by at least 70%, 80%, 85%, 90% or more, very especially preferably are at least 95%, more preferably are at least 99% or more in comparison to the control, reference or wild type. Most preferably the reduction, decrease or deletion in activity amounts to 100%.

[0038] In this context, inactivation means that the enzymatic or biological activity of the polypeptides encoded is no longer detectable in the organism or in the cell such as, for example, within the plant or plant cell. For the purposes of the invention, downregulation (=reduction) means that the enzymatic or biological activity of the polypeptides encoded is partly or essentially completely reduced in comparison with the activity of the untreated organism. This can be achieved by different cell-biological mechanisms. In this context, the activity can be downregulated in the entire organism or, in the case of multi-celled organisms, in individual parts of the organism, in the case of plants for example in tissues such as the seed, the leaf, the root or other parts. In this context, the enzymatic activity or biological activity is reduced by at least 10%, advantageously at least 20%, preferably at least 30%, especially preferably at least 40%, 50% or 60%, very especially preferably at least 70%, 80%, 85% or 90% or more, very especially preferably are at least 95%, more preferably are at least 99% or more in comparison to the control, reference or wild type. Most preferably the reduction, decrease or deletion in activity amounts to 100%.

[0039] Various strategies for reducing the quantity (=expression), the activity or the function of proteins encoded by the nucleic acids or the nucleic acid sequences itself according to the invention are encompassed in accordance with the invention. The skilled worker will recognize that a series of different methods are available for influencing the quantity of a protein, the activity or the function in the desired manner.

[0040] The term “biological activity” means the biological function of the protein of the invention. In contrast to the term “biological activity” the term “activity” means the increase in the production of the compound produced by the inventive process. The term “biological activity” preferably refers to the enzymatic function, transporter carrier function, DNA-packaging function, heat shock protein function, recombination protein function, beta-galactosidase function, Serine/threonine-protein kinase CTR1 function, lipase function, enoyl-CoA hydratase function, UDP-glucose glucosyltransferase function, cell division protein function, flavonol synthase function, tracylglycerol lipase, MADS-box protein function, pectinesterase function, pectin metylesterase function, calcium transporting ATPase function, protein kinase function, lysophospholipase function, Chlorophyll A-B binding proteins function, Ca2+-transporting ATPase-like protein function, peroxidase function, disease resistance RPP5 like protein function, or regulatory function of a peptide or protein in an organism, a tissue, a cell or a cell compartment. Suitable substrates are low-molecular-weight compounds and also the protein interaction partners of a protein. The term “reduction” of the biological function refers, for example, to the quantitative reduction in binding capacity or binding strength of a protein for at least one substrate in an organism, a tissue, a cell or a cell compartment—for example by one of the methods described herein below—in comparison with the wild type of the same genus and species to which this method has not been applied, under otherwise identical conditions (such as, for example, culture conditions, age of the plants and the like). Reduction is also understood as meaning the modification of the substrate specificity as can be expressed for example, by the kcat/Km value. In this context, a reduction of the function of at least 10%, advantageously of at least 20%, preferably at least 30%, especially preferably of at least 40%, 50% or 60%, very especially preferably of at least 70%, 80%, 90% or 95%, in comparison with the untreated organism is advantageous. A particularly advantageous embodiment is the inactivation of the function. Binding partners for the protein can be identified in the manner with which the skilled worker is familiar, for example by the yeast 2-hybrid system.

[0041] A modification, i.e. a decrease, can be caused by endogenous or exogenous factors. For example, a decrease in activity in an organism or a part thereof can be caused by adding a chemical compound such as an antagonist to the media, nutrition, soil of the plants or to the plants themselves.

[0042] The transformed plant cells are compared to the corresponding non-transformed wild type of the same genus and species under otherwise identical conditions (such as, for example, culture conditions, age of the plants and the like). In this context, a change of at least 10%, advantageously of at least 20%, preferably at least 30%, especially preferably of at least 40%, 50% or 60%, very especially preferably of at least 70%, 80%, 90%, 95% or even 100% or more, in comparison with the non-transformed organism is advantageous.

[0043] Preferably the change in metabolite concentration of the transformed plant cells is the changed compared to the corresponding non-transformed wild type. Preferably the change in metabolite concentration is measured by HPLC and calculated by dividing the peak height or peak area of each analyte (metabolite) through the peak area of the respective internal standards. Data is normalized using the individual sample fresh weight. The resulting values are divided by the mean values found for wild type plants grown under control conditions and analysed in the same sequence, resulting in the so-called ratios, which represent values independent of the analytical sequence. These ratios indicate the behavior of the metabolite concentration of the transformed plants in comparison to the concentration in the wild type control plants.

[0044] According to this method, the change in at least one metabolite concentration of the transformed plant cells compared to the corresponding non-transformed wild type is at least 10%, advantageously of at least 20%, preferably at least 40%, 60% or 80%, especially preferably of at least 90%, 100% or 200%, very especially preferably of at least 300%, 350%, 400%, 500%, 600%, 800%, 1000% or more.

[0045] Data significance can be determinated by all statistical methods known by a person skilled in the art, preferably by a t-test, more preferably by the student t-test.

[0046] In a preferred embodiment of the invention, the altered metabolic activity also refers to metabolites that, compared to a corresponding non transformed wild type plant cell, are not produced after transformation or are only produced after transformation or the production of said metabolite is increased.

[0047] More preferred the concentration of at least one metabolite is reduced, most preferred the concentration of at least one metabolite is zero, or the concentration of at least one metabolite is increased, compared to a corresponding non transformed wild type plant cell and calculated according to the above described method.

[0048] Preferred metabolites of the invention are 2,3-dimethyl-5-phytylquinol or 2-hydroxy-palmitic acid or 3,4-dihydroxyphenylalanine (=dopa) or 3-hydroxy-palmitic acid or 5-oxoproline or alanine or alpha linolenic acid (c18:3 (c9, c12, c15)) or alpha-tocopherol or aminoadipic acid or anhydroglucose or arginine or aspartic acid or beta-apo-8′ carotenal or beta-carotene or beta-sitosterol or beta-tocopherol or (delta-7-cis,10-cis)-hexadecadienic acid or hexadecatrienic acid or margaric acid or delta-15-cis-tetracosenic acid or ferulic acid or campesterol or cerotic acid (c26:0) or citrulline or cryptoxanthine or eicosenoic acid (20:1) or fructose or fumarate or galactose or gamma-aminobutyric acid or gamma-tocopherol or gluconic acid or glucose or glutamic acid or glutamine or glycerate or glycerinaldehyd or glycerol or glycerol-3-phosphate or glycine or homoserine or inositol or isoleucine or iso-maltose or isopentenyl pyrophosphate or leucine or lignoceric acid (c24:0) or linoleic acid (c18:2 (c9, c12)) or luteine or lycopene or malate or mannose or methionine or methylgalactofuranoside or methylgalactopyranoside or methylgalactopyranoside or palmitic acid (c16:0) or phenylalanine or phosphate or proline or putrescine or pyruvat or raffinose or ribonic acid or serine or shikimate or sinapine acid or stearic acid (c18:0) or succinate or sucrose or threonine or triacontanoic acid or tryptophane or tyrosine or ubichinone or udp-glucose or valine or zeaxanthine.

[0049] Metabolic activity may also be altered concerning one or more derivates of one or more of the above metabolites.

[0050] Preferably metabolic activity is altered concerning one or more metabolites selected from the group consisting of all of the above metabolites.

[0051] Alternatively metabolic activity may be altered concerning one or more metabolites selected from the group consisting of mannose, inositol, phosphate, aspartic acid, isoleucine, leucine, gamma-aminobutyric acid, glycerinaldehyd, sucrose, campesterol, valine, beta-tocopherol, ubichinone, palmitic acid (c16:0), 2-hydroxy-palmitic acid, 2,3-dimethyl-5-phytylquinol, beta-carotene, alpha-linolenic acid (c18:3 (c9, c12, c15)), lycopene.

[0052] Alternatively metabolic activity may be altered concerning one or more metabolites selected from the group consisting of methylgalactofuranoside, beta-sitosterol, delta-15-cis-tetracosenic acid (c24:1 me), margaric acid (c17:0 me), stearic acid (c18:0), methylgalactopyranoside, gamma-tocopherol, linoleic acid (c18:2 (c9, c12)), hexadecatrienic acid (c16:3 me), shikimate, raffinose, glutamic acid, glutamine, udp-glucose, proline, threonine, isopentenyl pyrophosphate, 5-oxoproline, ferulic acid, sinapine acid.

[0053] Alternatively metabolic activity may be altered concerning one or more metabolites selected from the group consisting of tryptophane, citrulline, serine, alanine, glycerate, arginine, 3-hydroxy-palmitic acid, putrescine, 3,4-dihydroxyphenylalanine (=dopa), alpha-tocopherol, aminoadipic acid, anhydroglucose, beta-apo-8′ carotenal, delta-7-cis,10-cis-hexadecadienic acid (c16:2 me), cerotic acid (c26:0), cryptoxanthine, eicosenoic acid (20:1), fructose, fumarate.

[0054] Alternatively metabolic activity may be altered concerning one or more metabolites-selected from the group consisting of galactose, gluconic acid, glucose, glycerol, glycerol-3-phosphate, glycine, homoserine, iso-maltose, lignoceric acid (c24:0), luteine, malate, triacontanoic acid, methionine, phenylalanine, pyruvate, ribonic acid, succinate, tyrosine, zeaxanthine.

[0055] In the invention inactivation or down-regulation of a gene in the plant cell results in altered metabolic activity as compared to a corresponding non-transformed wild type plant cell. One preferred wild type plant cell is a non-transformed Arabidopsis plant cell. An example here is the Arabidopsis wild type C24 (Nottingham Arabidopsis Stock Centre, UK; NASC Stock N906).

[0056] Other preferred wild type plant cells are a non-transformed from plants selected from the group consisting of maize, wheat, rye, oat, triticale, rice, barley, soybean, peanut, cotton, rapeseed, canola, manihot, pepper, sunflower, flax, borage, safflower, linseed, primrose, rapeseed, turnip rape, tagetes, solanaceous plants, potato, tobacco, eggplant, tomato, Vicia species, pea, alfalfa, coffee, cacao, tea, Salix species, oil palm, coconut, perennial grass and forage crops.

[0057] More preferred wild type plant cells are a non-transformed Linum plant cell, preferably Linum usitatissimum, more preferably the variety Brigitta, Golda, Gold Merchant, Helle, Juliel, Olpina, Livia, Marlin, Maedgold, Sporpion, Serenade, Linus, Taunus, Lifax or Liviola, a non-transformed Heliantus plant cell, preferably Heliantus annuus, more preferably the variety Aurasol, Capella, Flavia, Flores, Jazzy, Palulo, Pegasol, PIR64A54, Rigasol, Sariuca, Sideral, Sunny, Alenka, Candisol or Floyd, or a non-transformed Brassica plant cell, preferably Brassica napus, more preferably the variety Dorothy, Evita, Heros, Hyola, Kimbar, Lambada, Licolly, Liconira, Licosmos, Lisonne, Mistral, Passat, Serator, Siapula, Sponsor, Star, Caviar, Hybridol, Baical, Olga, Lara, Doublol, Karola, Falcon, Spirit, Olymp, Zeus, Libero, Kyola, Licord, Lion, Lirajet, Lisbeth, Magnum, Maja, Mendel, Mica, Mohican, Olpop, Ontarion, Panthar, Prinoe, Pronio, Susanna, Talani, Titan, Transfer, Wiking, Woltan, Zeniah, Artus, Contact or Smart.

[0058] Inactivation or down-regulation of a gene is advantageous since no new gene must be introduced to achieve the altered metabolic activity resulting in increased tolerance and/or resistance to environmental stress. Only an endogenous gene is hindered in its expression.

[0059] The inactivated or down-regulated gene or genes directly or indirectly influence the stress tolerance of plants, preferably the metabolic activity of the transformed plant cells. Preferably they influence the activity of the above metabolites.

[0060] Stress tolerance, conferred preferably by altered metabolic activity may be conferred by one or more inactivated or down-regulated genes encoded by one or more nucleic acid sequences selected from the group consisting of
[0061] a) nucleic acid molecule encoding on of the polypeptides shown in FIG. 1a, 1b, 1c or 1d;
[0062] b) nucleic acid molecule comprising at least one of the nucleic acid molecules shown in FIG. 1a, 1b, 1c or 1d;
[0063] c) nucleic acid molecule comprising a nucleic acid sequence, which, as a result of the degeneracy of the genetic code, can be derived from a polypeptide sequence depicted in FIG. 1a, 1b, 1c or 1d;
[0064] d) nucleic acid molecule encoding a polypeptide having at least 50% identity with the amino acid sequence of the polypeptide encoded by the nucleic acid molecule of (a) to (c) and having the biological activity represented by protein of FIG. 1a, 1b, 1c or 1d;
[0065] e) nucleic acid molecule encoding a polypeptide which is isolated with the aid of monoclonal antibodies against a polypeptide encoded by one of the nucleic acid molecules of (a) to (d) and having the biological activity represented by the protein of FIG. 1a, 1b, 1c or 1d;
[0066] f) nucleic acid molecule which is obtainable by screening a suitable nucleic acid library under stringent hybridization conditions with a probe comprising one of the sequences of the nucleic acid molecule of (a) or (b) or with a fragment thereof having at least 15 nucleotides of the nucleic acid molecule characterized in (a) to (c) and encoding a polypeptide having the biological activity represented by a protein whose reduction or deletion results in increased tolerance and/or resistance to an environmental stress

[0067] or which comprises a sequence which is complementary thereto.

[0068] For the purpose of the present invention the term FIG. 1a, 1b, 1c or 1d involves and means the SEQ ID NO: 1 to 112 and 114 to 283 and the term FIG. 2 means SEQ ID NO: 113.

[0069] Particularly, the term FIG. 1a means SEQ ID NO: 1, 2, 3, 4, 5, 6, 7, 8, 9, 10, 11, 12, 13, 14, 15, 16, 17, 18, 19, 20, 21, 22, 23, 24, 25, 26, 27, 28, 29, 30, 31, 32, 33, 34, 35, 36, 37, 38, 39, 40, 41, 42, 43, 44, 45, 46, 47, 48, 49, 50, 51, 52, 53, 54, 55, 56, 57, 58, 59, 60, 61, 62, 63, 64, 65, 66, 67, 68, 69, 70, 71, 72, 73, 74, 75, 76, 77, 78, 79, 80, 81, 82, 83, 84, 85, 86, 87, 88, 89 and/or 90.

The term FIG. 1b means SEQ ID NO: 91, 92, 93, 94, 95, 96, 97, 98, 99, 100, 101, 102, 103, 104, 105, 106, 107, 108, 109, 110 and/or 111.

[0070] The term FIG. 1c means SEQ ID NO: 114, 118, 120, 122, 124, 126, 128, 134, 136, 138, 140, 142, 144, 148, 150, 152, 154, 156, 158, 160, 164, 166, 168, 170, 171, 172, 173, 175, 180, 182, 184, 186, 188, 190, 192, 194, 196, 198, 200, 202, 204, 206, 208, 214, 216, 218, 224, 226, 228, 230, 232, 234, 236, 238, 240, 244, 246, 248, 250, 252, 254, 256, 258, 260, 262, 264, 266, 268, 270, 272, 275, 277 and/or 282 and/or

[0071] 115, 119, 121, 123, 125, 127, 129, 135, 137, 139, 141, 143, 145, 149, 151, 153, 155, 157, 159, 161, 165, 167, 169, 174, 176, 179, 181, 183, 185, 187, 189, 191, 193, 195, 197, 199, 201, 203, 205, 207, 209, 215, 217, 219, 225, 227, 229, 231, 233, 235, 237, 239, 241, 245, 247, 249, 251, 253, 255, 257, 259, 261, 263, 265, 267, 269, 271, 273, 274, 276, 278, 281 and/or 283.

The term FIG. 1d means SEQ ID NO 116, 130, 132, 146, 162, 177, 210, 212, 220, 222, 242, and/or 279 and/or 117, 131, 133, 147, 163, 178, 211, 213, 221, 223, 243 and/or 280.

[0072] More precisely, when polypeptides or proteins according to FIG. 1a are mentioned, then the SEQ ID NO 2, 4, 6, 8, 10, 12, 14, 16, 18, 20, 22, 24, 26, 28, 30, 32, 34, 36, 38, 40, 42, 44, 46, 48, 50, 52, 54, 56, 58, 60, 62, 64, 66, 68, 70, 72, 74, 76, 78, 80, 82, 84, 86, 88 and/or 90 are meant;

[0073] when polypeptides or proteins according to FIG. 1b are mentioned, then the SEQ ID NO 92, 94, 96, 98, 100, 102, 104, 106, 108, 110 and/or 112 are meant; when polypeptides or proteins according to FIG. 1c are mentioned, then the SEQ ID NO 115, 119, 121, 123, 125, 127, 129, 135, 137, 139, 141, 143, 145, 149, 151, 153, 155, 157, 159, 161, 165, 167, 169, 174, 176, 179, 181, 183, 185, 187, 189, 191, 193, 195, 197, 199, 201, 203, 205, 207, 209, 215, 217, 219, 225, 227, 229, 231, 233, 235, 237, 239, 241, 245, 247, 249, 251, 253, 255, 257, 259, 261, 263, 265, 267, 269, 271, 273, 274, 276, 278, 281 and/or 283 are meant;

when polypeptides or proteins according to FIG. 1d are mentioned, then the SEQ ID NO 117, 131, 133, 147, 163, 178, 211, 213, 221, 223, 243 and/or 280 are meant.

[0074] More precisely, when polynucleotides or nucleic acid molecules according to FIG. 1a are mentioned, then the SEQ ID NO 1, 3, 5, 7, 9, 11, 13, 15, 17, 19, 21, 23, 25, 27, 29, 31, 33, 35, 37, 39, 41, 43, 45, 47, 49, 51, 53, 55, 57, 59, 61, 63, 65, 67, 69, 71, 73, 75, 77, 79, 81, 83, 85, 87 and/or 89 are meant;

when polynucleotides or nucleic acid molecules according to FIG. 1b are mentioned, then the SEQ ID NO 91, 93, 95, 97, 99, 101, 103, 105, 107, 109 and/or 111 are meant;

[0075] when polynucleotides or nucleic acid molecules according to FIG. 1c are mentioned, then the SEQ ID NO 114, 118, 120, 122, 124, 126, 128, 134, 136, 138, 140, 142, 144, 148, 150, 152, 154, 156, 158, 160, 164, 166, 168, 170, 171, 172, 173, 175, 180, 182, 184, 186, 188, 190, 192, 194, 196, 198, 200, 202, 204, 206, 208, 214, 216, 218, 224, 226, 228, 230, 232, 234, 236, 238, 240, 244, 246, 248, 250, 252, 254, 256, 258, 260, 262, 264, 266, 268, 270, 272, 275, 277 and/or 282 are meant;

when polynucleotides or nucleic acid molecules according to FIG. 1d are mentioned, then the SEQ ID NO 116, 130, 132, 146, 162, 177, 210, 212, 220, 222, 242, and/or 279 are meant.

[0076] With the present invention it is possible to identify the genes encoded by a nucleic acid sequence selected from the group consisting of sequences shown in FIG. 1a, 1 b, 1c or 1d and/or homologs thereof in target plants, especially crop plants, and then inactivate or down-regulate the corresponding gene to achieve an increased tolerance and/or resistance to environmental stress (preferably by the altered metabolic activity). Consequently the invention is not limited to a specific plant.

[0077] It is further possible to detect environmental stress in plant cells or plants by screening the plant cells for altered metabolic activity as compared to non-stress conditions. This allows for monitoring of stress levels in plants, even when no symptoms are visible. Therefore counter action can be taken earlier and e.g. crop losses minimized by timely watering.

[0078] It is also within the scope of the invention to screen plant cells or plants for increased tolerance and/or resistance to environmental stress by screening the plant cells under stress conditions for altered metabolic activity as compared to non-stress conditions. This allows selection of plants with increased tolerance and/or resistance to environmental stress without the identification of genes or visual symptoms.

[0079] With the invention it is further possible to breed plant cells or plants towards increased tolerance and/or resistance to environmental stress by screening the plant cells under stress conditions for altering metabolic activity as compared to non-stress conditions and selecting those with increased tolerance and/or resistance to environmental stress. The screening for metabolite activity is faster and easier than e.g. screening for genes.

[0080] Screening is well known to those skilled in the art and generally refers to the search for a particular attribute or trait. In the invention this trait in a plant or plant cell is preferably the concentration of a metabolite, especially preferred the concentration of the above metabolites. The methods and devices for screening are familiar to those skilled in the art and include GC (gas chromatography), LC (liquid chromatography), HPLC (high performance (pressure) liquid chromatography), MS (mass spectrometry), NMR (nuclear magnetic resonance) spectroscopy, IR (infra red) spectroscopy, photometric methods etc and combinations of these methods.

[0081] Breeding is also customary knowledge for those skilled in the art. It is understood as the directed and stable incorporation of a particular attribute or trait into a plant or plant cell.

[0082] The various breeding steps are characterized by well-defined human intervention such as selecting the lines to be crossed, directing pollination of the parental lines, or selecting appropriate progeny plants. Different breeding measures can be taken, depending on the desired properties. All the techniques are well known by a person skilled in the art and include for example, but are not limited to hybridization, inbreeding, backcross breeding, multiline breeding, variety blend, interspecific hybridization, aneuploid techniques, etc. Hybridization techniques also can include the sterilization of plants to yield male or female sterile plants by mechanical, chemical, or biochemical means. Cross pollination of a male sterile plant with pollen of a different line assures that the genome of the male sterile but female fertile plant will uniformly obtain properties of both of the parental lines. The transgenic seeds and plants according to the invention can therefor be used for the breeding of improved plant lines, which can increase the effectiveness of conventional methods such as herbicide or pesticide treatment or which allow one to dispense with said methods due to their modified genetic properties. Alternatively new crops with improved stress tolerance, preferably drought and temperature, can be obtained, which, due to their optimized genetic “equipment”, yield harvested product of better quality than products that were not able to tolerate comparable adverse developmental conditions.

[0083] Environmental stress includes but is not limited to salinity, drought, temperature, metal, chemical, pathogenic and oxidative stress, or combinations thereof, preferably drought and/or temperature.

[0084] As used herein, the term “environmental stress” refers to any sub-optimal growing condition and includes, but is not limited to, sub-optimal conditions associated with salinity, drought, temperature, metal, chemical, pathogenic and oxidative stresses, or combinations thereof. In preferred embodiments, environmental stress may be salinity, drought, heat, or low temperature, or combinations thereof, and in particular, may be low water content or low temperature. Wherein drought-stress means any environmental stress which leads to a lack of water in plants or reduction of water supply to plants; wherein low temperature stress means freezing of plants below +4° C. as well as chilling of plants below 15° C. and wherein high temperature stress means for example a temperature above 35° C. The range of stress and stress response depends on the different plants which are used for the invention, i.e. it differs for example between a plant such as wheat and a plant such as Arabidopsis. It is also to be understood that as used in the specification and in the claims, “a” or “an” can mean one or more, depending upon the context in which it is used. Thus, for example, reference to “a cell” means that at least one cell may be utilized.

[0085] The invention also provides a transformed plant cell with one or more nucleic acid sequences homologous to one or more of sequences of FIG. 1a, 1b, 1c or 1d, wherein the plant is selected from the group comprised of maize, wheat, rye, oat, triticale, rice, barley, soybean, peanut, cotton, rapeseed, canola, manihot, pepper, sunflower, flax, borage, safflower, linseed, primrose, rapeseed, turnip rape, tagetes, solanaceous plants, potato, tobacco, eggplant, tomato, Vicia species, pea, alfalfa, coffee, cacao, tea, Salix species, oil palm, coconut, perennial grass, forage crops and Arabidopsis thaliana.

[0086] The present invention further provides a transgenic plant cell with an inactivated or down-regulated gene selected from the group comprising sequences of FIG. 1a, 1b, 1c or 1d and/or homologs thereof, preferably Brassica napus, Glycine max or Oryza sativa.

[0087] Furthermore it is possible to identify the genes encoded by a nucleic acid sequence selected from the group consisting of sequences of FIG. 1a, 1b, 1c or 1d and/or homologs thereof in target plants, especially crop plants, and then inactivate or down-regulate the corresponding gene to achieve increased tolerance and/or resistance to environmental stress. Consequently the invention is not limited to a specific plant.

[0088] The invention also provides a transformed plant cell with a nucleic acid sequence homologous to one of sequences of FIG. 1a, 1b, 1c or 1d, wherein the plant is selected from the group comprised of maize, wheat, rye, oat, triticale, rice, barley, soybean, peanut, cotton, rapeseed, canola, manihot, pepper, sunflower, flax, borage, safflower, linseed, primrose, rapeseed, turnip rape, tagetes, solanaceous plants, potato, tobacco, eggplant, tomato, Vicia species, pea, alfalfa, coffee, cacao, tea, Salix species, oil palm, coconut, perennial grass, forage crops and Arabidopsis thaliana.

[0089] Also the invention provides a transformed plant cell, wherein the nucleic acid or acids are at least about 30%, especially at least about 50% homologous to sequences of FIG. 1a, 1b, 1c or 1d.

[0090] According to the invention the transformed plant cell may be derived from a monocotyledonous or a dicotyledonous plant.

[0091] The monocotyledonous or a dicotyledonous plant may be selected from the group comprised of maize, wheat, rye, oat, triticale, rice, barley, soybean, peanut, cotton, rapeseed, canola, manihot, pepper, sunflower, flax; borage, safflower, linseed, primrose rapeseed, turnip-Tape, tagetes, solanaceous plants, potato, tobacco, eggplant, tomato, Vicia species, pea, alfalfa, coffee, cacao, tea, Salix species, oil palm, coconut, perennial grass, forage crops and Arabidopsis thaliana.

[0092] The transformed plant cell may be derived from a gymnosperm plant and can preferably be selected from the group of spruce, pine and fir.

[0093] The invention also provides a transformed plant generated from said plant cell and which is a monocot or dicot plant.

[0094] The transformed plant may be selected from the group comprised of maize, wheat, rye, oat, triticale, rice, barley, soybean, peanut, cotton, rapeseed, canola, manihot, pepper, sunflower, flax, borage, safflower, linseed, primrose, rapeseed, turnip rape, tagetes, solanaceous plants, potato, tobacco, eggplant, tomato, Vicia species, pea, alfalfa, coffee, cacao, tea, Salix species, oil palm, coconut, perennial grass, forage crops and Arabidopsis thaliana.

[0095] Preferably the transformed, plant generated from said plant cell is a gymnosperm plant, more preferred a plant selected from the group consisting of spruce, pine and fir.

[0096] The invention not only deals with plants but also with an agricultural product produced by any of the described transformed plants, plant parts such as leafs, petal, anther, roots, tubers, stems, buds, flowers or especially seeds produced by said transformed plant, which are at least genetically heterozygous, preferably homozygous for a gene or its homolog, that when inactivated or down-regulated confers an increased tolerance and/or resistance to environmental stress as compared to a wild type plant.

[0097] Homologs of the aforementioned sequences can be isolated advantageously from yeast, fungi, viruses, algae bacteria, such as Acetobacter (subgen. Acetobacter) aceti; Acidithiobacillus ferrooxidans; Acinetobacter sp.; Actinobacillus sp; Aeromonas salmonicida; Agrobacterium tumefaciens; Aquifex aeolicus; Arcanobacterium pyogenes; Aster yellows phytoplasma; Bacillus sp.; Bifidobacterium sp.; Borrelia burgdorferi; Brevibacterium linens; Brucella melitensis; Buchnera sp.; Butyrivibrio fibrisolvens; Campylobacter jejuni; Caulobacter crescentus; Chlamydia sp.; Chlamydophila sp.; Chlorobium limicola; Citrobacter rodentium; Clostridium sp.; Comamonas testosteroni; Corynebacterium sp.; Coxiella burnetii; Deinococcus radiodurans; Dichelobacter nodosus; Edwardsiella ictaluri; Enterobacter sp.; Erysipelothrix rhusiopathiae; Escherichia coli; Flavobacterium sp.; Francisella tularensis; Frankia sp. Cpl1; Fusobacterium nucleatum; Geobacillus stearothermophilus; Gluconobacter oxydans; Haemophilus sp.; Helicobacter pylori; Klebsiella pneumoniae; Lactobacillus sp.; Lactococcus lactis; Listeria sp.; Mannheimia haemolytica; Mesorhizobium loti; Methylophaga thalassica; Microcystis aeruginosa; Microscilla sp. PRE1; Moraxella sp. TA144; Mycobacterium sp.; Mycoplasma sp.; Neisseria sp.; Nitrosomonas sp.; Nostoc sp. PCC 7120; Novosphingobium aromaticivorans; Oenococcus oeni; Pantoea citrea; Pasteurella multocida; Pediococcus pentosaceus; Phormidium foveolarum; Phytoplasma sp. Plectonema boryanum; Prevotella ruminicola; Propionibacterium sp.; Proteus vulgaris; Pseudomonas sp.; Ralstonia sp.; Rhizobium sp.; Rhodococcus equi; Rhodothermus marinus; Rickettsia sp.; Riemerella anatipestifer; Ruminococcus flavefaciens; Salmonella sp.; Selenomonas ruminantium; Serratia entomophila; Shigella sp.; Sinorhizobium meliloti; Staphylococcus sp.; Streptococcus sp.; Streptomyces sp.; Synechococcus sp.; Synechocystis sp. PCC 6803; Thermotoga maritima; Treponema sp.; Ureaplasma urealyticum; Vibrio cholerae; Vibrio parahaemolyticus; Xylella fastidiosa; Yersinia sp.; Zymomonas mobilis, preferably Salmonella sp. or Escherichia coli or plants, preferably from yeasts such as from the genera Saccharomyces, Pichia, Candida, Hansenula, Torulopsis or Schizosaccharomyces, or even more preferred from plants such as Arabidopsis thaliana, maize, wheat, rye, oat, triticale, rice, barley, soybean, peanut, cotton, borage, safflower, linseed, primrose, rapeseed, canola and turnip rape, manihot, pepper, sunflower, tagetes, solanaceous plant such as potato, tobacco, eggplant and tomato, Vicia species, pea, alfalfa, bushy plants such as coffee, cacao, tea, Salix species, trees such as oil palm, coconut, perennial grass, such as ryegrass and fescue, and forage crops, such as alfalfa and clover and from spruce, pine or fir for example, more preferably from Saccharomyces cerevisiae or plants, preferably Brassica napus, Glycine max or Oryza sativa.

[0098] “Homologs” are defined herein as two nucleic acids or proteins that have similar, or “homologous”, nucleotide or amino acid sequences, respectively. Homologs include allelic variants, orthologs, paralogs, agonists and antagonists of SRP as defined hereafter. The term “homolog” further encompasses nucleic acid molecules that differ from one of the nucleotide sequences shown in sequences of FIG. 1a, 1b, 1c or 1d (and portions thereof) due to degeneracy of the genetic code and thus encode the same SRP as that encoded by the amino acid sequences shown in sequences of FIG. 1a, 1b, 1c or 1d. As used herein a “naturally occurring” SRP refers to a SRP amino acid sequence that occurs in nature.

[0099] The term “homology” means that the respective nucleic acid molecules or encoded proteins are functionally and/or structurally equivalent. The nucleic acid molecules that are homologous to the nucleic acid molecules described above and that are derivatives of said nucleic acid molecules are, for example, variations of said nucleic acid molecules which represent modifications having the same biological function, in particular encoding proteins with the same or substantially the same biological function. They may be naturally occurring variations, such as sequences from other plant varieties or species, or mutations. These mutations may occur naturally or may be obtained by mutagenesis techniques. The allelic variations may be naturally occurring allelic variants as well as synthetically produced or genetically engineered variants. Structurally equivalents can, for example, be identified by testing the binding of said polypeptide to antibodies or computer based predictions. Structurally equivalent have the similar immunological characteristic, e.g. comprise similar epitopes.

[0100] Functional equivalents derived from one of the polypeptides as shown in FIG. 1a, 1b, 1c or 1d according to the invention by substitution, insertion or deletion have at least 30%, 35%, 40%, 45% or 50%, preferably at least 55%, 60%, 65% or 70% by preference at least 80%, especially preferably at least 85% or 90%, 91%, 92%, 93% or 94%, very especially preferably at least 95%, 97%, 98% or 99% homology with one of the polypeptides as shown in FIG. 1a, 1b, 1c or 1d according to the invention and are distinguished by essentially the same properties as the polypeptide as shown in FIG. 1a, 1b, 1c or 1d.

[0101] Functional equivalents derived from the nucleic acid sequence as shown in FIG. 1a, 1b, 1c or 1d according to the invention by substitution, insertion or deletion have at least 30%, 35%, 40%, 45% or 50%, preferably at least 55%, 60%, 65% or 70% by preference at least 80%, especially preferably at least 85% or 90%, 91%, 92%, 93% or 94%, very especially preferably at least 95%, 97%, 98% or 99% homology with one of the polypeptides as shown in FIG. 1a, 1b, 1c or 1d according to the invention and encode polypeptides having essentially the same properties as the polypeptide as shown in FIG. 1a, 1b, 1c or 1d.

[0102] “Essentially the same properties” of a functional equivalent is above all understood as meaning that the functional equivalent has above mentioned activity, e.g conferring an increase in the fine chemical amount while increasing the amount of protein, activity or function of said functional equivalent in an organism, e.g. a microorganism, a plant or plant or animal tissue, plant or animal cells or a part of the same.

[0103] By “hybridizing” it is meant that such nucleic acid molecules hybridize under conventional hybridization conditions, preferably under stringent conditions such as described by, e.g., Sambrook (Molecular Cloning; A Laboratory Manual, 2nd Edition, Cold Spring. Harbor Laboratory Press, Cold Spring Harbor, N.Y. (1989)) or in Current Protocols in Molecular Biology, John Wiley & Sons, N.Y. (1989), 6.3.1-6.3.6.

[0104] According to the invention, DNA as well as RNA molecules of the nucleic acid of the invention can be used as probes. Further, as template for the identification of functional homologues. Northern blot assays as well as Southern blot assays can be performed. The Northern blot assay advantageously provides further informations about the expressed gene product: e.g. expression pattern, occurrence of processing steps, like splicing and capping, etc. The Southern blot assay provides additional information about the chromosomal localization and organization of the gene encoding the nucleic acid molecule of the invention.

[0105] A preferred, nonlimiting example of stringent hydridization conditions are hybridizations in 6× sodium chloride/sodium citrate (=SSC) at approximately 45° C., followed by one or more wash steps in 0.2×SSC, 0.1% SDS at 50 to 65° C., for example at 50° C., 55° C. or 60° C. The skilled worker knows that these hybridization conditions differ as a function of the type of the nucleic acid and, for example when organic solvents are present, with regard to the temperature and concentration of the buffer. The temperature under “standard hybridization conditions” differs for example as a function of the type of the nucleic acid between 42° C. and 58° C., preferably between 45° C. and 50° C. in an aqueous buffer with a concentration of 0.1×0.5×, 1×, 2×, 3×, 4× or 5×SSC (pH 7.2). If organic solvent(s) is/are present in the abovementioned buffer, for example 50% formamide, the temperature under standard conditions is approximately 40° C., 42° C. or 45° C. The hybridization conditions for DNA:DNA hybrids are preferably for example 0.1×SSC and 20° C., 25° C., 30° C., 35° C., 40° C. or 45° C., preferably between 30° C. and 45° C. The hybridization conditions for DNA:RNA hybrids are preferably for example 0.1×SSC and 30° C., 35° C., 40° C., 45° C., 50° C. or 55° C., preferably between 45° C. and 55° C. The abovementioned hybridization temperatures are determined for example for a nucleic acid approximately 100 bp (=base pairs) in length and a G+C content of 50% in the absence of formamide. The skilled worker knows to determine the hybridization conditions required with the aid of textbooks, for example the ones mentioned above, or from the following textbooks: Sambrook et al., “Molecular Cloning”, Cold Spring Harbor Laboratory, 1989; Hames and Higgins (Ed.) 1985, “Nucleic Acids Hybridization: A Practical Approach”, IRL Press at Oxford University Press, Oxford; Brown (Ed.) 1991, “Essential Molecular Biology: A Practical Approach”, IRL Press at Oxford University Press, Oxford.

[0106] A further example of one such stringent hybridization condition is hybridization at 4×SSC at 65° C., followed by a washing in 0.1×SSC at 65° C. for one hour. Alternatively, an exemplary stringent hybridization condition is in 50% formamide, 4×SSC at 42° C. Further, the conditions during the wash step can be selected from the range of conditions delimited by low-stringency conditions (approximately 2×SSC at 50° C.) and high-stringency conditions (approximately 0.2×SSC at 50° C., preferably at 65° C.) (20×SSC: 0.3M sodium citrate, 3M NaCl, pH 7.0). In addition, the temperature during the wash step can be raised from low-stringency conditions at room temperature, approximately 22° C., to higher-stringency conditions at approximately 65° C. Both of the parameters salt concentration and temperature can be varied simultaneously, or else one of the two parameters can be kept constant while only the other is varied. Denaturants, for example formamide or SDS, may also be employed during the hybridization. In the presence of 50% formamide, hybridization is preferably effected at 42° C. Relevant factors like i) length of treatment, ii) salt conditions, iii) detergent conditions, iv) competitor DNAs, v) temperature and vi) probe selection can be combined case by case so that not all possibilities can be mentioned herein.

[0107] Thus, in a preferred embodiment, Northern blots are prehybridized with Rothi-Hybri-Quick buffer (Roth, Karlsruhe) at 68° C. for 2 h. Hybridization with radioactive labelled probe is done overnight at 68° C. Subsequent washing steps are performed at 68° C. with 1×SSC.

[0108] For Southern blot assays the membrane is prehybridized with Rothi-Hybri-Quick buffer (Roth, Karlsruhe) at 68° C. for 2 h. The hybridization with radioactive labelled probe is conducted over night at 68° C. Subsequently the hybridization buffer is discarded and the filter shortly washed using 2×SSC; 0,1% SDS. After discarding the washing buffer new 2×SSC; 0,1% SDS buffer is added and incubated at 68° C. for 15 minutes. This washing step is performed twice followed by an additional washing step using 1×SSC; 0,1% SDS at 68° C. for 10 min.

[0109] Some further examples of conditions for DNA hybridization (Southern blot assays) and wash step are shown hereinbelow:

(1) Hybridization conditions can be selected, for example, from the following conditions:

[0110] a) 4×SSC at 65° C.,
[0111] b) 6×SSC at 45° C.,
[0112] c) 6×SSC, 100 mg/ml denatured fragmented fish sperm DNA at 68° C.,
[0113] d) 6×SSC, 0.5% SDS, 100 mg/ml denatured salmon sperm DNA at 68° C.,
[0114] e) 6×SSC, 0.5% SDS, 100 mg/ml denatured fragmented salmon sperm DNA, 50% formamide at 42° C.,
[0115] f) 50% formamide, 4×SSC at 42° C.,
[0116] g) 50% (vol/vol) formamide, 0.1% bovine serum albumin, 0.1% Ficoll, 0.1% polyvinylpyrrolidone, 50 mM sodium phosphate buffer pH 6.5, 750 mM NaCl, 75 mM sodium citrate at 42° C.,
[0117] h) 2× or 4×SSC at 50° C. (low-stringency condition), or
[0118] i) 30 to 40% formamide, 2× or 4×SSC at 42° C. (low-stringency condition).
   (2) Wash steps can be selected, for example, from the following conditions:
[0119] a) 0.015 M NaCl/0.0015 M sodium citrate/0.1% SDS at 50° C.
[0120] b) 0.1×SSC at 65° C.
[0121] c) 0.1×SSC, 0.5% SDS at 68° C.
[0122] d) 0.1×SSC, 0.5% SDS, 50% formamide at 42° C.
[0123] e) 0.2×SSC, 0.1% SDS at 42° C.
[0124] f) 2×SSC at 65° C. (low-stringency condition).

[0125] With regard to the invention described here, “transformed” means all those plants or parts thereof which have been brought about and/or modified by manipulation methods and in which either
[0126] a) one or more genes, preferably encoded by one or more nucleic acid sequence as depicted in sequences of FIG. 1a, 1b, 1c or 1d or a homolog thereof, or
[0127] b) a genetic regulatory element or elements, for example promoters, which are functionally linked e.g. to a nucleic acid sequence of sequences of FIG. 1a, 1b, 1 c or 1d or a homolog thereof, or
[0128] c) (a) and (b)

[0129] is/are not present in its/their natural genetic environment and/or has/have been modified by means of manipulation methods.

[0130] It is possible for the modification to be, by way of example, a substitution, addition, deletion, inversion or insertion of one or more nucleotides.

[0131] Manipulation in the present invention is also meant to encompass all changes in the plant cell, including induced or non-induced (spontaneous) mutagenesis, directed or non-directed genetic manipulation by conventional breeding or by modern genetic manipulation methods, e.g. reduction of gene expression by double-stranded RNA interference (dsRNAi), introduction of an antisense nucleic acid, a ribozyme, an antisense nucleic acid combined with a ribozyme, a nucleic acid encoding a co-suppressor, a nucleic acid encoding a dominant negative protein, DNA- or RNA- or protein-binding factors targeting said gene or -RNA or -proteins, RNA degradation inducing viral nucleic acids and expression systems, systems for inducing a homolog recombination of said genes, mutations in said genes or a combination of the above.

[0132] Additional modifications and manipulation methods will become apparent from the further description.

[0133] “Natural genetic environment” means the natural chromosomal locus in the organism of origin or the presence in a genomic library. In the case of a genomic library, the natural, genetic environment of the nucleic acid sequence is preferably at least partially still preserved. The environment flanks the nucleic acid sequence at least on one side and has a sequence length of at least 50 bp, preferably at least 500 bp, particularly preferably at least 1000 bp, very particularly preferably at least 5000 bp.

[0134] A plant or plant cell is considered “true breeding” for a particular attribute if it is genetically homozygous for that attribute to the extent that, when the true-breeding plant is self-pollinated, a significant amount of independent segregation of the attribute among the progeny is not observed.

[0135] As also used herein, the terms “nucleic acid” and “nucleic acid molecule” are intended to include DNA molecules (e.g., cDNA or genomic DNA) and RNA molecules (e.g., mRNA) and analogs of the DNA or RNA generated using nucleotide analogs. This term also encompasses untranslated sequence located at both the 3′ and 5′ ends of the coding region of the gene: at least about 1000 nucleotides of sequence upstream from the 5′ end of the coding region and at least about 200 nucleotides of sequence downstream from the 3′ end of the coding region of the gene. The nucleic acid molecule can be single-stranded or double-stranded, but preferably is double-stranded DNA.

[0136] An “isolated” nucleic acid molecule is one that is substantially separated from other nucleic acid molecules, which are present in the natural source of the nucleic acid. That means other nucleic acid molecules are present in an amount less than 5% based on weight of the amount of the desired nucleic acid, preferably less than 2% by weight, more preferably less than 1% by weight, most preferably less than 0.5% by weight. Preferably, an “isolated” nucleic acid is free of some of the sequences that naturally flank the nucleic acid (i.e., sequences located at the 5′ and 3′ ends of the nucleic acid) in the genomic DNA of the organism from which the nucleic acid is derived. For example, in various embodiments, the isolated gene encoding nucleic acid molecule can contain less than about 5 kb, 4 kb, 3 kb, 2 kb, 1 kb, 0.5 kb or 0.1 kb of nucleotide sequences which naturally flank the nucleic acid molecule in genomic DNA of the cell from which the nucleic acid is derived. Moreover, an “isolated” nucleic acid molecule, such as a cDNA molecule, can be free from some of the other cellular material with which it is naturally associated, or culture medium when produced by recombinant techniques, or chemical precursors or other chemicals when chemically synthesized.

[0137] A nucleic acid molecule of the present invention, e.g., a nucleic acid, molecule encoding a gene or a portion thereof or a homolog thereof which confers tolerance and/or resistance to environmental stress in plants, when inactivated or down-regulated, can be isolated using standard molecular biology techniques and the sequence information provided herein. For example, an Arabidopsis thaliana gene encoding cDNA can be isolated from an A. thaliana library using all or portion of one of sequences of the nucleic acid as shown in FIG. 1a, 1b, 1c or 1d. Moreover, a nucleic acid molecule encompassing all or a portion of one of the sequences of sequences of FIG. 1a, 1b, 1c or 1d can be isolated by the polymerase chain reaction using oligonucleotide primers designed based upon this sequence. For example, mRNA can be isolated from plant cells (e.g., by the guanidinium-thiocyanate extraction procedure of Chirgwin et al., 1979 Biochemistry 18:5294-5299) and cDNA can be prepared using reverse transcriptase (e.g., Moloney MLV reverse transcriptase, available from Gibco/BRL, Bethesda, Md.; or AMV reverse transcriptase, available from Seikagaku America, Inc., St. Petersburg, Fla.). Synthetic oligonucleotide primers for polymerase chain reaction amplification can be designed based upon one of the nucleotide sequences shown in FIG. 1a, 1b, 1c or 1d. A nucleic acid molecule of the invention can be amplified using cDNA or, alternatively, genomic DNA, as a template and appropriate oligonucleotide primers according to standard PCR amplification techniques. The nucleic acid molecule so amplified can be cloned into an appropriate vector and characterized by DNA sequence analysis. Furthermore, oligonucleotides corresponding to a gene encoding nucleotide sequence can be prepared by standard synthetic techniques, e.g., using an automated DNA synthesizer.

[0138] In a preferred embodiment, an isolated nucleic acid molecule of the invention comprises one of the nucleotide sequences shown in sequences of FIG. 1a, 1b, 1c or 1d or homologs thereof encoding a gene (i.e., the “coding region”), as well as 5′ untranslated sequences and 3′ untranslated sequences.

[0139] Moreover, the nucleic acid molecule of the invention can comprise only a portion of the coding region of one of sequences of FIG. 1a, 1b, 1c or 1d or homologs thereof, for example, a fragment which can be used as a probe or primer or a fragment encoding a biologically active portion of a gene.

[0140] Portions of genes or proteins encoded by said gene encoding nucleic acid molecules of the invention are preferably biologically active portions of genes or proteins described herein. As used herein, the term “biologically active portion of” a gene or protein encoded by said gene is intended to include a portion, e.g., a domain/motif, of the gene or protein that participates in stress tolerance and/or resistance response in a plant, which is preferably achieved by altering metabolic activity. To determine whether inactivation or down-regulation of a gene or protein encoded by said gene, or a biologically active portion thereof, results in increased stress tolerance in a plant which is preferably achieved by altering metabolic activity, a stress analysis of a plant comprising the protein may be performed for example by the above screening method. More specifically, nucleic acid fragments encoding biologically active portions of a gene or protein encoded by said gene can be prepared by isolating a portion of one of sequences of the nucleic acid as shown in FIG. 1a, 1b, 1c or 1d or homologs thereof expressing the encoded portion of the gene, protein or peptide (e.g., by recombinant expression in vitro) and assessing the activity of the encoded portion of the gene, protein or peptide.

[0141] Moreover, it is possible to identify conserved regions from various organisms by carrying out protein sequence alignments with the polypeptide used in the process of the invention, in particular with sequences of the polypeptide of the invention, from which conserved regions, and in turn, degenerate primers can be derived. Conserved region for the polypeptide of the invention are indicated in the alignments shown in the figures. Conserved regions are those, which show a very little variation in the amino acid in one particular position of several homologs from different origin.

[0142] Typically portions of a protein encompassed by the present invention include peptides comprising amino acid sequences derived from the amino acid sequence of the protein encoded by one of sequences of FIG. 1a, 1b, 1c or 1d, or the amino acid sequence of a protein homologous to the protein, which include fewer amino acids than the full length protein or a full length protein which is homologous to the protein, and exhibits at least some activity of the protein. Preferred portions according to the present invention (e.g., peptides or proteins which are, for example, 5, 10, 15, 20, 30, 35, 36, 37, 38, 39, 40, 50, 100 or more amino acids in length) comprise a domain or motif with at least some activity of the protein. Moreover, other biologically active portions in which other regions of the protein are deleted can be prepared by recombinant techniques and evaluated for one or more of the activities described herein. Preferably, the biologically active portions of the protein include one or more selected domains/motifs or portions thereof having biological activity.

[0143] In addition to fragments of the protein described herein, the present invention especially includes homologs and analogs of naturally occurring proteins and protein encoding nucleic acids in a plant.

[0144] “Homologs” are defined herein as two nucleic acids or proteins that have similar, or “homologous”, nucleotide or amino acid sequences, respectively. Homologs include allelic variants, orthologs, paralogs, agonists and antagonists of the protein as defined hereafter. The term “homolog” further encompasses nucleic acid molecules that differ from one of the nucleotide sequences shown in sequences of FIG. 1a, 1b, 1c or 1d (and portions thereof) due to degeneracy of the genetic code and thus encode the same protein as that encoded by the amino acid sequences. As used herein a “naturally occurring” refers to an amino acid sequence that occurs in nature.

[0145] In addition to fragments and fusion polypeptides of the invention described herein, the present invention includes homologs and analogs of naturally occurring proteins and protein encoding nucleic acids of the invention in a plant. “Homologs” are defined, herein as two nucleic acids or polypeptides that have similar, or substantially identical, nucleotide or amino acid sequences, respectively. Homologs include allelic variants, orthologs, paralogs, agonists and antagonists of SRPs as defined hereafter. The term “homolog” further encompasses nucleic acid molecules that differ from one of the nucleotide sequences shown in FIG. 1a, 1b, 1c or 1d (and portions thereof) due to degeneracy of the genetic code and thus encode the same SRP as that encoded by the nucleotide sequences shown in FIG. 1a, 1b, 1c or 1d. As used herein a “naturally occurring” protein refers to amino acid sequence that occurs in nature. Preferably, a naturally occurring protein whose reduction or deletion results in increased tolerance and/or resistance to an environmental stress comprises an amino acid sequence selected from the group consisting of ones shown in FIG. 1a, 1b, 1c or 1d.

[0146] An agonist of the protein whose reduction or deletion results in increased tolerance and/or resistance to an environmental stress can retain substantially the same, or a subset, of the biological activities of the said protein. An antagonist of the said protein can inhibit one or more of the activities of the naturally occurring form of the protein whose reduction or deletion results in increased tolerance and/or resistance to an environmental stress. For example, an antagonist can competitively bind to a downstream or upstream member of the cell membrane component metabolic cascade that includes said protein, or bind to the protein of the invention that mediates transport of compounds across such membranes, thereby preventing translocation from taking place.

[0147] Nucleic acid molecules corresponding to natural allelic variants and analogs, orthologs and paralogs of a protein of the invention cDNA can be isolated based on their identity to the Arabidopsis thaliana, Saccharomyces cerevisiae, E. coli, Brassica napus, Glycine max, or Oryza sativa protein nucleic acids described herein using said proteins cDNAs, or a portion thereof, as a hybridization probe according to standard hybridization techniques under stringent hybridization conditions. In an alternative embodiment, homologs of the protein whose reduction or deletion results in increased tolerance and/or resistance to an environmental stress can be identified by screening combinatorial libraries of mutants, e.g., truncation mutants, of said protein for their agonist or antagonist activity. In one embodiment, a variegated library of protein whose reduction or deletion results in increased tolerance and/or resistance to an environmental stress variants is generated by combinatorial mutagenesis at the nucleic acid level and is encoded by a variegated gene library. A variegated library of SRP variants can be produced by, for example, enzymatically ligating a mixture of synthetic oligonucleotides into gene sequences such that a degenerate set of potential SRP sequences is expressible as individual polypeptides, or alternatively, as a set of larger fusion polypeptides (e.g., for phage display) containing the set of protein whose reduction or deletion results in increased tolerance and/or resistance to an environmental stress sequences therein. There are a variety of methods that can be used to produce libraries of potential protein homologs from a degenerate oligonucleotide sequence. Chemical synthesis of a degenerate gene sequence can be performed in an automatic DNA synthesizer, and the synthetic gene is then ligated into an appropriate expression vector. Use of a degenerate set of genes allows for the provision, in one mixture, of all of the sequences encoding the desired set of potential protein of the invention sequences. Methods for synthesizing degenerate oligonucleotides are known in the art. See, e.g., Narang, S. A., 1983, Tetrahedron 39:3; Itakura et al., 1984, Annu. Rev. Biochem. 53:323; Itakura et al., 1984, Science 198:1056; Ike et al., 1983, Nucleic Acid Res. 11:477.

[0148] In addition, libraries of fragments of the protein of the invention coding regions can be used to generate a variegated population of protein fragments for screening and subsequent selection of homologs of a said proteins. In one embodiment, a library of coding sequence fragments can be generated by treating a double stranded PCR fragment of a protein of the invention coding sequence with a nuclease under conditions wherein nicking occurs only about once per molecule, denaturing the double stranded DNA, renaturing the DNA to form double stranded DNA, which can include sense/antisense pairs from different nicked products, removing single stranded portions from reformed duplexes by treatment with S1 nuclease, and ligating the resulting fragment library into an expression vector. By this method, an expression library can be derived which encodes N-terminal, C-terminal, and internal fragments of various sizes of the protein whose reduction or deletion results in increased tolerance and/or resistance to an environmental stress.

[0149] Several techniques are known in the art for screening gene products of combinatorial libraries made by point mutations or truncation, and for screening cDNA libraries for gene products having a selected property. Such techniques are adaptable for rapid screening of the gene libraries generated by the combinatorial mutagenesis of SRP homologs. The most widely used techniques, which are amenable to high through-put analysis, for screening large gene libraries typically include cloning the gene library into replicable expression vectors, transforming appropriate cells with the resulting library of vectors, and expressing the combinatorial genes under conditions in which detection of a desired activity facilitates isolation of the vector encoding the gene whose product was detected. Recursive ensemble mutagenesis (REM), a new technique that enhances the frequency of functional mutants in the libraries, can be used in combination with the screening assays to identify SRP homologs (Arkin and Yourvan, 1992, PNAS 89:7811-7815; Delgrave et al., 1993, Polypeptide Engineering 6(3):327-331). In another embodiment, cell based assays can be exploited to analyze a variegated protein (of the invention) library, using methods well known in the art. The present invention further provides a method of identifying a novel protein whose reduction or deletion results in increased tolerance and/or resistance to an environmental stress, comprising (a) raising a specific antibody response to said protein, or a fragment thereof, as described herein; (b) screening putative SRP material with the antibody, wherein specific binding of the antibody to the material indicates the presence of a potentially novel protein whose reduction or deletion results in increased tolerance and/or resistance to an environmental stress; and (c) analyzing the bound material in comparison to known proteins, to determine its novelty.

[0150] As stated above, the present invention includes protein whose reduction or deletion results in increased tolerance and/or resistance to an environmental stress and homologs thereof. To determine the percent sequence identity of two amino acid sequences (e.g., one of the sequences of FIG. 1a, 1b, 1c or 1d, and a mutant form thereof), the sequences are aligned for optimal comparison purposes (e.g., gaps can be introduced in the sequence of one polypeptide for optimal alignment with the other polypeptide or nucleic acid). The amino acid residues at corresponding amino acid positions are then compared. When a position in one sequence (e.g., one of the sequences of FIG. 1a, 1b, 1c or 1d) is occupied by the same amino acid residue as the corresponding position in the other sequence (e.g., a mutant form of the sequence selected from the polypeptide of FIG. 1a, 1b, 1c or 1d), then the molecules are identical at that position. The same type of comparison can be made between two nucleic acid sequences.

[0151] The percent sequence identity between the two sequences is a function of the number of identical positions shared by the sequences (i.e., percent sequence identity=numbers of identical positions/total numbers of positions×100). Preferably, the isolated amino acid homologs included in the present invention are at least about 50-60%, preferably at least about 60-70%, and more preferably at least about 70-75%, 75-80%, 80-85%, 85-90% or 90-95%, and most preferably at least about 96%, 97%, 98%, 99% or more identical to an entire amino acid sequence shown in FIG. 1a, 1b, 1c or 1d. In yet another embodiment, the isolated amino acid homologs included in the present invention are at least about 50-60%, preferably at least about 60-70%, and more preferably at least about 70-75%, 75-80%, 80-85%, 85-90% or 90-95%, and most preferably at least about 96%, 97%, 98%, 99% or more identical to an entire amino acid sequence encoded by a nucleic acid sequence shown in FIG. 1a, 1b, 1c or 1d. In other embodiments, the amino acid homologs of the proteins of the invention have sequence identity over at least 15 contiguous amino acid residues, more preferably at least 25 contiguous amino acid residues, and most preferably at least 35 contiguous amino acid residues of a polypeptide of FIG. 1a, 1b, 1c or 1d.

[0152] In another preferred embodiment, an isolated nucleic acid homolog of the invention comprises a nucleotide sequence which is at least about 50-60%, preferably at least about 60-70%, more preferably at least about 70-75%, 75-80%, 80-85%, 85-90% or 90-95%, and even more preferably at least about 95%, 96%, 97%, 98%, 99% or more identical to a nucleotide sequence shown in FIG. 1a, 1b, 1c or 1d, or to a portion comprising at least 20, 30, 40, 50, 60 consecutive nucleotides thereof. The preferable length of sequence comparison for nucleic acids is at least 75 nucleotides, more preferably at least 100 nucleotides and most preferably the entire length of the coding region.

[0153] It is further preferred that the isolated nucleic acid homolog of the invention encodes a SRP, or portion thereof, that is at least 85% identical to an amino acid sequence of FIG. 1a, 1b, 1 c or 1d and that functions as a modulator of an environmental stress response in a plant. In a more preferred embodiment, overexpression of the nucleic acid homolog in a plant increases the tolerance of the plant to an environmental stress.

[0154] For the purposes of the invention, the percent sequence identity between two nucleic acid or polypeptide sequences may be determined using the Vector NTI 6.0 (PC) software package (InforMax, 7600 Wisconsin Ave., Bethesda, Md. 20814). A gap opening penalty of 15 and a gap extension penalty of 6.66 are used for determining the percent identity of two nucleic acids. A gap opening penalty of 10 and a gap extension penalty of 0.1 are used for determining the percent identity of two polypeptides. All other parameters are set at the default settings. For purposes of a multiple alignment (Clustal W algorithm), the gap opening penalty is 10, and the gap extension penalty is 0.05 with blosum62 matrix. It is to be understood that for the purposes of determining sequence identity when comparing a DNA sequence to an RNA sequence, a thymidine nucleotide is equivalent to a uracil nucleotide.

[0155] In another aspect, the invention provides an isolated nucleic acid comprising a polynucleotide that hybridizes to the polynucleotide of FIG. 1a, 1b, 1c or 1d under stringent conditions. More particularly, an isolated nucleic acid molecule of the invention is at least 15 nucleotides in length and hybridizes under stringent conditions to the nucleic acid molecule comprising a nucleotide sequence of FIG. 1a, 1b, 1c or 1d. In other embodiments, the nucleic acid is at least 30, 50, 100, 250 or more nucleotides in length. Preferably, an isolated nucleic acid homolog of the invention comprises a nucleotide sequence which hybridizes under highly stringent conditions to the nucleotide sequence shown in FIG. 1a, 1b, 1c or 1d, and functions as a modulator of stress tolerance in a plant. In a further preferred embodiment, overexpression of the isolated nucleic acid homolog in a plant increases a plant's tolerance to an environmental stress.

[0156] As used herein with regard to hybridization for DNA to DNA blot, the term “stringent conditions” refers in one embodiment to hybridization overnight at 60° C. in 10× Denharts solution, 6×SSC, 0.5% SDS and 100 μg/ml denatured salmon sperm DNA. Blots are washed sequentially at 62° C. for 30 minutes each time in 3×SSC/0.1% SDS, followed by 1×SSC/0.1% SDS and finally 0.1×SSC/0.1% SDS. As also used herein, “highly stringent conditions” refers to hybridization overnight at 65° C. in 10× Denharts solution, 6×SSC, 0.5% SDS and 100 μg/ml denatured salmon sperm DNA. Blots are washed sequentially at 65° C. for 30 minutes each time in 3×SSC/0.1% SDS, followed by 1×SSC/0.1% SDS and finally 0.1×SSC/0.1% SDS. Methods for nucleic acid hybridizations are described in Meinkoth and Wahl, 1984, Anal. Biochem. 138:267-284; Ausubel et al. eds, 1995, Current Protocols in Molecular Biology, Chapter 2, Greene Publishing and Wiley-Interscience, New York; and Tijssen, 1993, Laboratory Techniques in Biochemistry and Molecular Biology: Hybridization with Nucleic Acid Probes, Part I, Chapter 2, Elsevier, New York. Preferably, an isolated nucleic acid molecule of the invention that hybridizes under stringent or highly stringent conditions to a sequence of FIG. 1a, 1b, 1c or 1d corresponds to a naturally occurring nucleic acid molecule. As used herein, a “naturally occurring” nucleic acid molecule refers to an RNA or DNA molecule having a nucleotide sequence that occurs in nature (e.g., encodes a natural polypeptide). In one embodiment, the nucleic acid encodes a naturally occurring Arabidopsis thaliana, Brassica napus, Glycine max, or Oryza sativa protein whose reduction or deletion results in increased tolerance and/or resistance to an environmental stress.

[0157] Using the above-described methods, and others known to those of skill in the art, one of ordinary skill in the art can isolate homologs of the protein whose reduction or deletion results in increased tolerance and/or resistance to an environmental stress comprising amino acid sequences shown in FIG. 1a, 1b, 1c or 1d. One subset of these homologs are allelic variants. As used herein, the term “allelic variant” refers to a nucleotide sequence containing polymorphisms that lead to changes in the amino acid sequences of said protein and that exist within a natural population (e.g., a plant species or variety). Such natural allelic variations can typically result in 1-5% variance in a nucleic acid of the invention. Allelic variants can be identified by sequencing the nucleic acid sequence of interest in a number of different plants, which can be readily carried out by using hybridization probes to identify the same SRP genetic locus in those plants. Any and all such nucleic acid variations and resulting amino acid polymorphisms or variations in a protein whose reduction or deletion results in increased tolerance and/or resistance to an environmental stress that are the result of natural allelic variation and that do not alter the functional activity of said protein, are intended to be within the scope of the invention.

[0158] An isolated nucleic acid molecule encoding a protein whose reduction or deletion results in increased tolerance and/or resistance to an environmental stress having sequence identity with a polypeptide sequence of FIG. 1a, 1b, 1c or 1d can be created by introducing one or more nucleotide substitutions, additions or deletions into a nucleotide sequence of FIG. 1a, 1b, 1c or 1d, respectively, such that one or more amino acid substitutions, additions, or deletions are introduced into the encoded polypeptide. Mutations can be introduced into one of the sequences of FIG. 1a, 1b, 1c or 1d by standard techniques, such as site-directed mutagenesis and PCR-mediated mutagenesis. Preferably, conservative amino acid substitutions are made at one or more predicted non-essential amino acid residues. A “conservative amino acid substitution” is one in which the amino acid residue is replaced with an amino acid residue having a similar side chain.

[0159] To knock the mutation is carried out preferably at essential positions!

[0160] Families of amino acid residues having similar side chains have been defined in the art. These families include amino acids with basic side chains (e.g., lysine, arginine, histidine), acidic side chains (e.g., aspartic acid, glutamic acid), uncharged polar side chains (e.g., glycine, asparagine, glutamine, serine, threonine, tyrosine, cysteine), nonpolar side chains (e.g., alanine, valine, leucine, isoleucine, proline, phenylalanine, methionine, tryptophan), beta-branched side chains (e.g., threonine, valine, isoleucine) and aromatic side chains (e.g., tyrosine, phenylalanine, tryptophan, histidine). Thus, a predicted nonessential amino acid residue in a protein of the invention is preferably replaced with another amino acid residue from the same side chain family. Alternatively, in another embodiment, mutations can be introduced randomly along all or part of a protein of the invention coding sequence, such as by saturation mutagenesis, and the resultant mutants can be screened for a SRP activity described herein to identify mutants that retain protein activity. Following mutagenesis of one of the sequences, of FIG. 1a, 1b, 1c or 1d, the encoded polypeptide can be expressed recombinantly and the activity of the polypeptide can be determined by analyzing the stress tolerance of a plant expressing the polypeptide as described herein.

[0161] In addition to the nucleic acid molecules encoding the protein whose reduction or deletion results in increased tolerance and/or resistance to an environmental stress described above, another aspect of the invention pertains to isolated nucleic acid molecules that are antisense thereto. Antisense polynucleotides are thought to inhibit gene expression of a target polynucleotide by specifically binding the target polynucleotide and interfering with transcription, splicing, transport, translation, and/or stability of the target polynucleotide. Methods are described in the prior art for targeting the antisense polynucleotide to the chromosomal DNA, to a primary RNA transcript, or to a processed mRNA. Preferably, the target regions include splice sites, translation initiation codons, translation termination codons, and other sequences within the open reading frame.

[0162] The term “antisense,” for the purposes of the invention, refers to a nucleic acid comprising a polynucleotide that is sufficiently complementary to all or a portion of a gene, primary transcript, or processed mRNA, so as to interfere with expression of the endogenous gene. “Complementary” polynucleotides are those that are capable of base pairing according to the standard Watson-Crick complementarity rules. Specifically, purines will base pair with pyrimidines to form a combination of guanine paired with cytosine (G:C) and adenine paired with either thymine (A:T) in the case of DNA, or adenine paired with uracil (A:U) in the case of RNA. It is understood that two polynucleotides may hybridize to each other even if they are not completely complementary to each other, provided that each has at least one region that is substantially complementary to the other. The term “antisense nucleic acid” includes single stranded RNA as well as double-stranded DNA expression cassettes that can be transcribed to produce an antisense RNA. “Active” antisense nucleic acids are antisense RNA molecules that are capable of selectively hybridizing with a primary transcript or mRNA encoding a polypeptide having at least 80% sequence identity with the polypeptide of FIG. 1a, 1b, 1c or 1d.

[0163] The antisense nucleic acid can be complementary to an entire SRP coding strand, or to only a portion thereof. In one embodiment, an antisense nucleic acid molecule is antisense to a “coding region” of the coding strand of a nucleotide sequence encoding a SRP. The term “coding region” refers to the region of the nucleotide sequence comprising codons that are translated into amino acid residues. In another embodiment, the antisense nucleic acid molecule is antisense to a “noncoding region” of the coding strand of a nucleotide sequence encoding a SRP. The term “noncoding region” refers to 5′ and 3′ sequences that flank the coding region that are not translated into amino acids (i.e., also referred to as 5′ and 3′ untranslated regions). The antisense nucleic acid molecule can be complementary to the entire coding region of SRP mRNA, but more preferably is an oligonucleotide which is antisense to only a portion of the coding or noncoding region of SRP mRNA. For example, the antisense oligonucleotide can be complementary to the region surrounding the translation start site of PKSRP mRNA. An antisense oligonucleotide can be, for example, about 5, 10, 15, 20, 25, 30, 35, 40, 45 or 50 nucleotides in length. Typically, the antisense molecules of the present invention comprise an RNA having 60-100% sequence identity with at least 14 consecutive nucleotides of FIG. 1a, 1b, 1c or 1d. Preferably, the sequence identity will be at least 70%, more preferably at least 75%, 80%, 85%, 90%, 95%, 98% and most preferably 99%.

[0164] An antisense nucleic acid of the invention can be constructed using chemical synthesis and enzymatic ligation reactions using procedures known in the art. For example, an antisense nucleic acid (e.g., an antisense oligonucleotide) can be chemically synthesized using naturally occurring nucleotides or variously modified nucleotides designed to increase the biological stability of the molecules or to increase the physical stability of the duplex formed between the antisense and sense nucleic acids, e.g., phosphorothioate derivatives and acridine substituted nucleotides can be used. Examples of modified nucleotides which can be used to generate the antisense nucleic acid include 5-fluorouracil, 5-bromouracil, 5-chlorouracil, 5-iodouracil, hypoxanthine, xanthine, 4-acetylcytosine, 5-(carboxyhydroxylmethyl)uracil, 5-carboxymethylaminomethyl-2-thiouridine, 5-carboxymethylaminomethyluracil, dihydrouracil, beta-D-galactosylqueosine, inosine, N6-isopentenyladenine, 1-methylguanine, 1-methylinosine, 2,2-dimethylguanine, 2-methyladenine, 2-methylguanine, 3-methylcytosine, 5-methylcytosine. N6-adenine, 7-methylguanine, 5-methylaminomethyluracil, 5-methoxyaminomethyl-2-thiouracil, beta-D-mannosylqueosine, 5′-methoxycarboxymethyluracil, 5-methoxyuracil, 2-methylthio-N6-isopentenyladenine, uracil-5-oxyacetic acid (v), wybutoxosine, pseudouracil, queosine, 2-thiocytosine, 5-methyl-2-thiouracil, 2-thiouracil, 4-thiouracil, 5-methyluracil, uracil-5-oxyacetic acid methylester, uracil-5-oxyacetic acid (v), 5-methyl-2-thiouracil, 3-(3-amino-3-N-2-carboxypropyl)uracil, (acp3)w, and 2,6-diaminopurine. Alternatively, the antisense nucleic acid can be produced biologically using an expression vector into which a nucleic acid has been subcloned in an antisense orientation (i.e., RNA transcribed from the inserted nucleic acid will be of an antisense orientation to a target nucleic acid of interest, described further in the following subsection).

[0165] In yet another embodiment, the antisense nucleic acid molecule of the invention is an α-anomeric nucleic acid molecule. An α-anomeric nucleic acid molecule forms specific double-stranded hybrids with complementary RNA in which, contrary to the usual β-units, the strands run parallel to each other (Gaultier et al., 1987, Nucleic Acids. Res. 15:6625-6641). The antisense nucleic acid molecule can also comprise a 2′-o-methylribonucleotide (Inoue et al., 1987, Nucleic Acids Res. 15:6131-6148) or a chimeric RNA-DNA analogue (Inoue et al., 1987, FEBS Lett. 215:327-330).

[0166] The antisense nucleic acid molecules of the invention are typically administered to a cell or generated in situ such that they hybridize with or bind to cellular mRNA and/or genomic DNA encoding a SRP to thereby inhibit expression of the polypeptide, e.g., by inhibiting transcription and/or translation. The hybridization can be by conventional nucleotide complementarity to form a stable duplex, or, for example, in the case of an antisense nucleic acid molecule which binds to DNA duplexes, through specific interactions in the major groove of the double helix. The antisense molecule can be modified such that it specifically binds to a receptor or an antigen expressed on a selected cell surface, e.g., by linking the antisense nucleic acid molecule to a peptide or an antibody which binds to a cell surface receptor or antigen, The antisense nucleic acid molecule can also be delivered to cells using the vectors described herein. To achieve sufficient intracellular concentrations of the antisense molecules, vector constructs in which the antisense nucleic acid molecule is placed under the control of a strong prokaryotic, viral, or eukaryotic (including plant) promoter are preferred.

[0167] As an alternative to antisense polynucleotides, ribozymes, sense polynucleotides, or double stranded RNA (dsRNA) can be used to reduce expression of a SRP polypeptide. By “ribozyme” is meant a catalytic RNA-based enzyme with ribonuclease activity which is capable of cleaving a single-stranded nucleic acid, such as an mRNA, to which it has a complementary region. Ribozymes (e.g., hammerhead ribozymes described in Haselhoff and Gerlach, 1988, Nature 334:585-591) can be used to catalytically cleave proteins of the invention mRNA transcripts to thereby inhibit translation of SR P mRNA. A ribozyme having specificity for a nucleic acid of the invention can be designed based upon the nucleotide sequence of a cDNA, as disclosed herein (i.e., sequences as shown in FIG. 1a, 1b, 1c or 1d) or on the basis of a heterologous sequence to be isolated according to methods taught in this invention. For example, a derivative of a Tetrahymena L-19 IVS RNA can be constructed in which the nucleotide sequence of the active site is complementary to the nucleotide sequence to be cleaved in a SRP-encoding mRNA. See, e.g., U.S. Pat. Nos. 4,987,071 and 5,116,742 to Cech et al. Alternatively, SRP mRNA can be used to select a catalytic RNA having a specific ribonuclease activity from a pool of RNA molecules. See, e.g., Bartel, D. and Szostak, J. W., 1993, Science 261:1411-1418. In preferred embodiments, the ribozyme will contain a portion having at least 7, 8, 9, 10, 12, 14, 16, 18 or 20 nucleotides, and more preferably 7 or 8 nucleotides, that have 100% complementarity to a portion of the target RNA. Methods for making ribozymes are known to those skilled in the art. See, e.g., U.S. Pat. Nos. 6,025,167; 5,773,260; and 5,496,698.

[0168] The term “dsRNA,” as used herein, refers to RNA hybrids comprising two strands of RNA. The dsRNAs can be linear or circular in structure. In a preferred embodiment, dsRNA is specific for a polynucleotide encoding either the polypeptide of FIG. 1a, 1b, 1c or 1d or a polypeptide having at least 70% sequence identity with FIG. 1a, 1b, 1c or 1d. The hybridizing RNAs may be substantially or completely complementary. By “substantially complementary,” is meant that when the two hybridizing RNAs are optimally aligned using the BLAST program as described above, the hybridizing portions are at least 95% complementary. Preferably, the dsRNA will be at least 100 base pairs in length. Typically, the hybridizing RNAs will be of identical length with no over hanging 5′ or 3′ ends and no gaps. However, dsRNAs having 5′ or 3′ overhangs of up to 100 nucleotides may be used in the methods of the invention.

[0169] The dsRNA may comprise ribonucleotides or ribonucleotide analogs, such as 2′-O-methyl ribosyl residues, or combinations thereof. See, e.g., U.S. Pat. Nos. 4,130,641 and 4,024,222. A dsRNA polyriboinosinic acid:polyribocytidylic acid is described in U.S. Pat. No. 4,283,393. Methods for making and using dsRNA are known in the art. One method comprises the simultaneous transcription of two complementary DNA strands, either in vivo, or in a single in vitro reaction mixture. See, e.g., U.S. Pat. No. 5,795,715. In one embodiment, dsRNA can be introduced into a plant or plant cell directly by standard transformation procedures. Alternatively, dsRNA can be expressed in a plant cell by transcribing two complementary RNAS.

[0170] Other methods for the inhibition of endogenous gene expression, such as triple helix formation (Moser et al., 1987, Science 238:645-650 and Cooney et al., 1988, Science 241:456-459) and cosuppression (Napoli et al., 1990, The Plant Cell 2:279-289) are known in the art. Partial and full-length cDNAs have been used for the cosuppression of endogenous plant genes. See, e.g., U.S. Pat. Nos. 4,801,340, 5,034,323, 5,231,020, and 5,283,184; Van der Kroll et al., 1990, The Plant Cell 2:291-299; Smith et al., 1990, Mol. Gen. Genetics 224:477-481 and Napoli et al., 1990, The Plant Cell 2:279-289.

[0171] For sense suppression, it is believed that introduction of a sense polynucleotide blocks transcription of the corresponding target gene. The sense polynucleotide will have at least 65% sequence identity with the target plant gene or RNA. Preferably, the percent identity is at least 80%, 90%, 95% or more. The introduced sense polynucleotide need not be full length relative to the target gene or transcript. Preferably, the sense polynucleotide will have at least 65% sequence identity with at least 100 consecutive nucleotides of FIG. 1a, 1b, 1c or 1d. The regions of identity can comprise introns and and/or exons and untranslated regions. The introduced sense polynucleotide may be present in the plant cell transiently, or may be stably integrated into a plant chromosome or extrachromosomal replicon.

[0172] Moreover, nucleic acid molecules encoding proteins from the same or other species such as protein analogs, orthologs and paralogs, are intended to be within the scope of the present invention. As used herein, the term “analogs” refers to two nucleic acids that have the same or similar function, but that have evolved separately in unrelated organisms. As used herein, the term “orthologs” refers to two nucleic acids from different species that have evolved from a common ancestral gene by speciation. Normally, orthologs encode proteins having the same or similar functions. As also used herein, the term “paralogs” refers to two nucleic acids that are related by duplication within a genome. Paralogs usually have different functions, but these functions may be related (Tatusov, R. L. et al. 1997 Science 278(5338):631-637). Analogs, orthologs and paralogs of naturally occurring proteins can differ from the naturally occurring proteins by post-translational modifications, by amino acid sequence differences, or by both. Post-translational modifications include in vivo and in vitro chemical derivatisation of polypeptides, e.g., acetylation, carboxylation, phosphorylation, or glycosylation, and such modifications may occur during polypeptide synthesis or processing or following treatment with isolated modifying enzymes. In particular, orthologs of the invention will generally exhibit at least 30%, more preferably 50%, and most preferably 90%, 91%, 92%, 93%, 94%, 95%, 96%, 97%, 98% or even 99% identity or homology with all or part of a naturally occurring protein amino acid sequence and will exhibit a function similar to a protein.

[0173] Such homologs, analogs, ortholdgs and paralogs will be referred to in general as homologs or being homologous throughout the present application.

[0174] Homologs of the sequences given in FIG. 1a, 1b, 1c or 1d are furthermore to be understood as meaning, for example, homologs, analogs, orthologs and paralogs which have at least 30% homology (=identity) at the derived amino acid level, preferably at least 50%, 60%, 70% or 80% homology, especially preferably at least 85% homology, very especially preferably 90%, 91%, 92%, 93%, 94%, homology, most preferably 95%, 96%, 97%, 98% or 99% homology. The homology (=identity) was calculated over the entire amino acid range. The program used was PileUp (J. Mol. Evolution., 25 (1987), 351-360, Higgens et al., CABIOS, 5 1989: 151-153) or the program. Gap and BestFit [Needleman and Wunsch (J. Mol. Biol. 48; 443-453 (1970) and Smith and Waterman respectively (Adv. Appl. Math. 2; 482-489 (1981)] which are part of the GCG software package [Genetics Computer Group, 575 Science Drive, Madison, Wis., USA 53711 (1991)]. The above mentioned percentages of sequence homology are calculated with the program BestFit or Gap, preferably Gap, over the total sequence length with the following parameters used: Gap Weight: 8, Length Weight: 2.

[0175] Furthermore the invention provides a method of producing a transformed plant, wherein inactivation or down-regulation of a gene in the transformed plant results in increased tolerance and/or resistance to environmental stress, which is preferably achieved by altering metabolic activity, as compared to a corresponding non-transformed wild type plant, comprising
[0176] (a) transforming a plant cell by inactivation or down-regulation of one or more genes, preferably encoded by one or more nucleic acids selected from a group consisting of th nucleic acids as shown in FIG. 1a, 1b, 1c or 1d and/or homologs thereof and
[0177] (b) generating from the plant cell a transformed plant with an increased tolerance and/or resistance to environmental stress as compared to a corresponding wild type plant.

[0178] The invention also incorporates a method of inducing increased tolerance and/or resistance to environmental stress as compared to a corresponding non-transformed wild type plant in said plant cell or said plant by altering metabolic activity, preferably of the above metabolites by inactivation or down-regulation of one or more genes encoded by one or more nucleic acids selected from a group consisting of the nucleic acids as shown in FIG. 1a, 1b, 1c or 1d and/or homologs thereof.

[0179] Preferably the nucleic acid is at least about 30%, especially at least 50% homologous to said sequence (see above). It is also possible that the homolog sequence stems form a plant selected from the group comprised of maize, wheat; rye, oat, triticale, rice, barley, soybean, peanut, cotton, rapeseed, canola, manihot, pepper, sunflower, flax, borage, safflower, linseed, primrose, rapeseed, turnip rape, tagetes, solanaceous plants, potato, tobacco, eggplant, tomato, Vicia species, pea, alfalfa, coffee, cacao, tea, Salix species, oil palm, coconut, perennial grass, forage crops and Arabidopsis thaliana, Brassica napus, Glycine max, or Oryza sativa.

[0180] Inactivation or down-regulation of said gene or genes may be achieved by all methods known to one skilled in the art, preferably by double-stranded RNA interference (dsRNAi), introduction of an antisense nucleic acid, a ribozyme, an antisense nucleic acid combined with a ribozyme, a nucleic acid encoding a co-suppressor, a nucleic acid encoding a dominant negative protein, DNA- or protein-binding factors targeting said gene or -RNA or -proteins, RNA degradation inducing viral nucleic acids and expression systems, systems for inducing a homolog recombination of said genes, mutations in said genes or a combination of the above.

[0181] The nucleic acid sequences of the invention or their homologs are isolated nucleic acid sequences which encode polypeptides. These nucleic acids or the polypeptides encoded by them and their biological and enzymatic activity are inactivated or downregulated in the method according to the invention which leads to increased resistance and/or tolerance to environmental stress, which is preferably achieved by altering metabolic activity.

[0182] In this context, inactivation means that the enzymatic or biological activity of the polypeptides encoded is no longer detectable in the organism or in the cell such as, for example, within the plant or plant cell. For the purposes of the invention, downregulation (=reduction) means that the enzymatic or biological activity of the polypeptides encoded is partly or essentially completely reduced in comparison with the activity of the untreated organism. This can be achieved by different cell-biological mechanisms. In this context, the activity can be downregulated in the entire organism or, in the case of multi-celled organisms, in individual parts of the organism, in the case of plants for example in tissues such as the seed, the leaf, the root or other parts. In this context, the enzymatic activity or biological activity is reduced by at least 10%, advantageously at least 20%, preferably at least 30%, especially preferably at least 40%, 50% or 60%, very especially preferably at least 70%, 80%, 90% or 95%, 99% or even 100% in comparison with the untreated organism. A particularly advantageous embodiment is the inactivation of the nucleic acids or of the polypeptides encoded by them.

[0183] Various strategies for reducing the quantity (expression), the activity or the function of proteins encoded by the nucleic acids according to the invention are encompassed in accordance with the invention. The skilled worker writ recognize that a series of different methods are available for influencing the quantity of a protein, the activity or the function in the desired manner.

[0184] A reduction in the activity or the function is preferably achieved by a reduced expression of a gene encoding an endogenous protein.

[0185] A reduction in the protein quantity, the activity or function can be achieved using the following methods:
[0186] a) introduction of a double-stranded RNA nucleic acid sequence (dsRNA) or of an expression cassette, or more than one expression cassette, ensuring the expression of the latter;
[0187] b) introduction of an antisense nucleic acid sequence or of an expression cassette ensuring the expression of the latter. Encompassed are those methods in which the antisense nucleic acid sequence is directed against a gene (i.e. genomic DNA sequences) or a gene transcript (i.e. RNA, sequences). Also encompassed are α-anomeric nucleic acid sequences.
[0188] c) introduction of an antisense nucleic acid sequence in combination with a ribozyme or of an expression cassette ensuring the expression of the former
[0189] d) introduction of sense nucleic acid sequences for inducing cosuppression or of an expression cassette ensuring the expression of the former
[0190] e) introduction of a nucleic acid sequence encoding dominant-negative protein or of an expression cassette ensuring the expression of the latter
[0191] f) introduction of DNA-, RNA- or protein-binding factors against genes, RNA's or proteins or of an expression cassette ensuring the expression of the latter
[0192] g) introduction of viral nucleic acid sequences and expression constructs which bring about the degradation of RNA, or of an expression cassette ensuring the expression of the former
[0193] h) introduction of constructs for inducing homologous recombination on endogenous genes, for example for generating knockout mutants.
[0194] i) introduction of mutations into endogenous genes for generating a loss of function (e.g. generation of stop codons, reading-frame shifts and the like)

[0195] Each of these methods may bring about a reduction in the expression, the activity or the function for the purposes of the invention. A combined use is also feasible. Further methods are known to the skilled worker and may encompass hindering or preventing processing of the protein, transport of the protein or its mRNA, inhibition of ribosomal attachment, inhibition of RNA splicing, induction of an enzyme which degrades RNA and/or inhibition of translational elongation or termination.

[0196] The term “protein quantity” refers to the amount of a polypeptide in an organism, a tissue, a cell or cell compartment. The term “reduction” of the protein quantity refers to the quantitative reduction of the amount of a protein in an organism, a tissue, a cell or a cell compartment—for example by one of the methods described herein below—in comparison with the wild type of the same genus and species to which this method has not been applied under otherwise identical conditions (such as, for example, culture conditions, age of the plants and the like). In this context, a reduction of at least 10%, advantageously of at least 20%, preferably at least 30%, especially preferably of at least 40%, 50% or 60%, very especially preferably of at least 70%, 80%, 90% or 95%, 99% or even 100% in comparison with the untreated organism is advantageous. An especially advantageous embodiment is the inactivation of the nucleic acids, or of the polypeptides encoded by them.

[0197] The term “activity” preferably refers to the activity of a polypeptide in an organism, a tissue, a cell or a cell compartment. The term “reduction” in the activity refers to the reduction in the overall activity of a protein in an organism, a tissue, a cell or a cell compartment—for example by one of the methods described herein below—in comparison with the wild type of the same genus and species, to which this method has not been applied, under otherwise identical conditions (such as, for example, culture conditions, age of the plants and the like). In this context, a reduction in activity of at least 10%, advantageously of at least 20%, preferably at least 30%, especially preferably of at least 40%, 50% or 60%, very especially preferably of at least 70%, 80%, 90% or 95%, 99% or even 100% in comparison with the untreated organism is advantageous. A particularly advantageous embodiment is the inactivation of the nucleic acids or of the polypeptides encoded by them.

[0198] The term “function” preferably refers to the enzymatic or regulatory function of a peptide in an organism, a tissue, a cell or a cell compartment. Suitable substrates are low-molecular-weight compounds and also the protein interaction partners of a protein. The term “reduction” of the function refers, for example, to the quantitative reduction in binding capacity or binding strength of a protein for at least one substrate in an organism, a tissue, a cell or a cell compartment—for example by one of the methods described herein below—in comparison with the wild type of the same genus and species to which this method has not been applied, under otherwise identical conditions (such as, for example, culture conditions, age of the plants and the like). Reduction is also understood as meaning the modification of the substrate specificity as can be expressed for example, by the kcat/Km value. In, this context, a reduction of the function of at least 10%, advantageously of at least 20%, preferably at least 30%, especially preferably of at least 40%, 50% or 60%, very especially preferably of at least 70%, 80%, 90010 or 95%, 99% or even 100% in comparison with the untreated organism is advantageous. A particularly advantageous embodiment is the inactivation of the function. Binding partners for the protein can be identified in the manner with which the skilled worker is familiar, for example by the yeast 2-hybrid system.

[0199] What follows is a brief description of the individual preferred methods:

[0200] A) Introduction of a Double-Stranded RNA Nucleic Acid Sequence dsRNA)

[0201] The method of regulating genes by means of double-stranded RNA (“double-stranded RNA interference”; dsRNAi) has been described extensively for animal and plant organisms (for example Matzke M A et al. (2000) Plant Mol. Biol. 43: 401-415; Fire A. et al. (1998) Nature 391: 806-811; WO 99/32619; WO 99/53050; WO 00/68374; WO 00/44914; WO 00/44895; WO 00/49035; WO 00/63364). The techniques and methods described in the above references are expressly referred to. Efficient gene suppression can also be observed in the case of transient expression or following transient transformation, for example as the consequence of a biolistic transformation (Schweizer P et al. (2000) Plant J 2000 24: 895-903). dsRNAi methods are based on the phenomenon that the simultaneous introduction of complementary strand and counterstrand of a gene transcript brings about highly effective suppression of the expression of the gene in question. The resulting phenotype is very similar to that of an analogous knock-out mutant (Waterhouse P M et al. (1998) Proc. Natl. Acad. Sci. USA 95: 13959-64).

[0202] Tuschl et al. [Gens Dev., 1999, 13 (24): 3191-3197] was able to show that the efficiency of the RNAi method is a function of the length of the duplex, the length of the 3′-end overhangs, and the sequence in these overhangs. Based on the work of Tuschl et al. and assuming that the underlining principles are conserved between different species the following guidelines can be given to the skilled worker:
[0203] to achieve good results the 5′ and 3′ untranslated regions of the used nucleic acid sequence and regions close to the start codon should be in general avoided as this regions are richer in regulatory protein binding sites and interactions between RNAi sequences and such regulatory proteins might lead to undesired interactions;
[0204] in plants the 5′ and 3′ untranslated regions of the used nucleic acid sequence and regions close to the start codon preferably 50 to 100 nt upstream of the start codon give good results and therefore should not be avoided;
[0205] preferably a region of the used mRNA is selected, which is 50 to 100 nt (=nucleotides or bases) downstream of the AUG start codon;
[0206] only dsRNA (=double-stranded RNA) sequences from exons are useful for the method, as sequences from introns have no effect;
[0207] the G/C content in this region should be greater than 30% and less than 70% ideally around 50%;
[0208] a possible secondary structure of the target mRNA is less important for the effect of the RNAi method.

[0209] The dsRNAi method has proved to be particularly effective and advantageous for reducing the expression of the nucleic acid sequences of sequences with odd numbers of SEQ ID No.'s 1-89 and/or homologs thereof. As described inter alia in WO 99/32619, dsRNAi approaches are clearly superior to traditional antisense approaches.

[0210] The invention therefore furthermore relates to double-stranded RNA molecules (dsRNA molecules) which, when introduced into an organism, advantageously into a plant (or a cell, tissue, organ or seed derived therefrom), bring about the reduction in the expression of the nucleic acid sequences of FIG. 1a, 1b, 1c or 1d and/or homologs thereof. In a double-stranded RNA molecule for reducing the expression of an protein encoded by a nucleic acid sequence of one of sequences of FIG. 1a, 1b, 1c or 1d and/or homologs thereof,
[0211] i) one of the two RNA strands is essentially identical to at least part of a nucleic acid sequence, and
[0212] ii) the respective other RNA strand is essentially identical to at least part of the complementary strand of a nucleic acid sequence.

[0213] The term “essentially identical” refers to the fact that the dsRNA sequence may also include insertions, deletions and individual point mutations in comparison to the target sequence while still bringing about an effective reduction in expression. Preferably, the homology as defined above amounts to at least 75%, preferably at least 80%, very especially preferably at least 90%, most preferably 100%, between the “sense” strand of an inhibitory dsRNA and a part-segment of a nucleic acid sequence of the invention (or between the “antisense” strand and the complementary strand of a nucleic acid sequence, respectively). The part-segment amounts to at least 10 bases, preferably at least 25 bases, especially preferably at least 50 bases, very especially preferably at least 100 bases, most preferably at least 200 bases or at least 300 bases in length. As an alternative, an “essentially identical” dsRNA may also be defined as a nucleic acid sequence which is capable of hybridizing with part of a gene transcript (for example in 400 mM NaCl, 40 mM PIPES pH 6.4, 1 mM EDTA at 50° C. or 70° C. for 12 to 16 h).

[0214] The dsRNA may consist of one or more strands of polymerized ribonucleotides. Modification of both the sugar-phosphate backbone and of the nucleosides may furthermore be present. For example, the phosphodiester bonds of the natural RNA can be modified in such a way that they encompass at least one nitrogen or sulfur hetero atom. Bases may undergo modification in such a way that the activity of, for example, adenosine deaminase is restricted. These and other modifications are described herein below in the methods for stabilizing antisense RNA.

[0215] The dsRNA can be prepared enzymatically; it may also be synthesized chemically, either in full or in part.

[0216] Short dsRNA up to 30bp, which effectively mediate RNA interference, can be for example efficiently generated by partial digestion of long dsRNA templates using E. coli ribonuclease III (RNase III). (Yang, D., et al. (2002) Proc. Natl. Acad. Sci. USA 99, 9942.)

[0217] The double-stranded structure can be formed starting from a single, self-complementary strand or starting from two complementary strands. In a single, self-complementary strand, “sense” and “antisense” sequence can be linked by a linking sequence (“linker”) and form for example a hairpin structure. Preferably, the linking sequence may take the form of an intron, which is spliced out following dsRNA synthesis. The nucleic acid sequence encoding a dsRNA may contain further elements such as, for example, transcription termination signals or polyadenylation signals. If the two strands of the dsRNA are to be combined in a cell or an organism advantageously in a plant, this can be brought about in a variety of ways:

[0218] a) transformation of the cell or of the organism, advantageously of a plant, with a vector encompassing the two expression cassettes,

[0219] b) cotransformation of the cell or of the organism, advantageously of a plant, with two vectors, one of which encompasses the expression cassettes with the “sense” strand while the other encompasses the expression cassettes with the “antisense” strand.

[0220] c) hybridization of two organisms, advantageously of plants, each of which has been transformed with one vector, one of which encompasses the expression cassettes with the “sense” strand while the other encompasses the expression cassettes with the “antisense” strand.

[0221] d) supertransformation of the cell or of the organism, advantageously of a plant, with a vector encompassing the expression cassettes with the “sense” strand, after the cell or the organism had already been transformed with a vector encompassing the expression cassettes with the “antisense” strand;

[0222] e) introduction of a construct comprising two promoters that lead to transcription of the desired sequence from both directions; and/or

[0223] f) infecting of the cell or of the organism with, advantageously of a plant, with an engeniered virus, which is able to produce the disered dsRNA molecule.

[0224] Formation of the RNA duplex can be initiated either outside the cell or within the cell.

[0225] If the dsRNA is synthesized outside the target cell or organism it can be introduced into the organism or a cell of the organism by injection, microinjection, electroporation, high velocity particles, by laser beam or mediated by chemical compounds (DEAE-dextran, calciumphosphate, liposomes) or in case of animals it is also possible to feed bacteria such as E. coli strains engineered to express-double-stranded RNAi to the animals.

[0226] As shown in WO 99/53050, the dsRNA may also encompass a hairpin structure, by linking the “sense” and “antisense” strands by a “linker” (for example an intron). The self-complementary dsRNA structures are preferred since they merely require the expression of a construct and always encompass the complementary strands in an equimolar ratio.

[0227] As shown in WO 99/53050, the dsRNA may also encompass a hairpin structure, by linking the “sense” and “antisense” strands by a “linker” (for example an intron). The self-complementary dsRNA structures are preferred since they merely require the expression of a construct and always encompass the complementary strands in an equimolar ratio.

[0228] The expression cassettes encoding the “antisense” or the “sense” strand of the dsRNA or the self-complementary strand of the dsRNA are preferably inserted into a vector and stably inserted into the genome of a plant, using the methods described herein below (for example using selection markers), in order to ensure permanent expression of the dsRNA.

[0229] The dsRNA can be introduced using an amount which makes possible at least one copy per cell. A larger amount (for example at least 5, 10, 100, 500 or 1000 copies per cell) may bring about more efficient reduction.

[0230] As has already been described, 100% sequence identity between the dsRNA and a gene transcript of a nucleic acid sequence of sequences with odd numbers of SEQ ID Nos in FIG. 1a, 1b, 1c or 1d or it's homolog is not necessarily required in order to bring about effective reduction in the expression. The advantage is, accordingly, that the method is tolerant with regard to sequence deviations as may be present as a consequence of genetic mutations, polymorphisms or evolutionary divergences. Thus, for example, using the dsRNA, which has been generated starting from a sequence of one of sequences of the nucleic acid as shown in FIG. 1a, 1b, 1c or 1d or homologs thereof of the one organism, may be used to suppress the corresponding expression in another organism.

[0231] Due to the high degree of sequence homology between the of FIG. 1a, 1b, 1c or 1d from various organisms (e.g. plants), i.e. proteins may be conserved to a high degree within, for example other plants, it is optionally possible that the expression of a dsRNA derived from one of the disclosed sequences as shown in FIG. 1a, 1b, 1c or 1d or homologs thereof also has an advantageous effect in other plant species.

[0232] The dsRNA can be synthesized either in vivo or in vitro. To this end, a DNA sequence encoding a dsRNA can be introduced into an expression cassette under the control of at least one genetic control element (such as, for example, promoter, enhancer, silencer, splice donor or splice acceptor or polyadenylation signal). Suitable advantageous constructs are described herein below. Polyadenylation is not required, nor do elements for initiating translation have to be present.

[0233] A dsRNA can be synthesized chemically or enzymatically. Cellular RNA polymerases or bacteriophage RNA polymerases (such as, for example T3, T7 or SP6 RNA polymerase) can be used for this purpose. Suitable methods for the in-vitro expression of RNA are described (WO 97/32016; U.S. Pat. No. 5,593,874; U.S. Pat. No. 5,698,425, U.S. Pat. No. 5,712,135, U.S. Pat. No. 5,789,214, U.S. Pat. No. 5,804,693). Prior to introduction into a cell, tissue or organism, a dsRNA which has been synthesized in vitro either chemically or enzymatically can be isolated to a higher or lesser degree from the reaction mixture, for example by extraction, precipitation, electrophoresis, chromatography or combinations of these methods. The dsRNA can be introduced directly into the cell or else be applied extracellularly (for example into the interstitial space).

[0234] Stable transformation of the plant with an expression construct which brings about the expression of the dsRNA is preferred, however. Suitable methods are described herein below.

[0235] B) Introduction of an Antisense Nucleic Acid Sequence

[0236] Methods for suppressing a specific protein by preventing the accumulation of its mRNA by means of “antisense” technology can be used widely and has been described extensively, including for plants (Sheehy et al. (1988) Proc. Natl. Acad. Sci. USA 85: 8805-8809; U.S. Pat. No. 4,801,100; Mol J N et al. (1990) FEBS Lett 268(2): 427-430). The antisense nucleic acid molecule hybridizes with, or binds to, the cellular mRNA and/or the genomic DNA encoding the target protein to be suppressed. This process suppresses the transcription and/or translation of the target protein. Hybridization can be brought about in the conventional manner via the formation of a stable duplex or, in the case of genomic DNA, by the antisense nucleic acid molecule-binding to the duplex of the genomic DNA by specific interaction in the large groove of the DNA helix.

[0237] An antisense nucleic acid sequence which is suitable for reducing the activity of a protein can be deduced using the nucleic acid sequence encoding this protein, for example the nucleic acid sequence as shown in FIG. 1a, 1b, 1c or 1d (or homologs, analogs, paralogs, orthologs thereof), by applying the base-pair rules of Watson and Crick. The antisense nucleic acid sequence can be complementary to all of the transcribed mRNA of the protein; it may be limited to the coding region, or it may only consist of one oligonucleotide which is complementary to part of the coding or noncoding sequence of the mRNA. Thus, for example, the oligonucleotide can be complementary to the nucleic acid region which encompasses the translation start for the protein. Antisense nucleic acid sequences may have an advantageous length of, for example, 5, 10, 15, 20, 25, 30, 35, 40, 45 or 50 nucleotides but they may also be longer and encompass at least 100, 200, 500, 1000, 2000 or 5000 nucleotides. Preferred is a length of 15-35, more preferred a length of 15, 20, 2, 30 or 35 nucleotides. Antisense nucleic acid sequences can be expressed recombinantly or synthesized chemically or enzymatically using methods known to the skilled worker. In the case of chemical synthesis, natural or modified nucleotides may be used. Modified nucleotides may confer increased biochemical stability to the antisense nucleic acid sequence and lead to an increased physical stability of the duplex formed by antisense nucleic acid sequence and sense target sequence. Examples of substances which can be used are phosphorothioate derivatives and acridine-substituted nucleotides such as 5-fluorouracil, 5-bromouracil, 5-chlorouracil, 5-iodouracil, hypoxanthin, xanthin, 4-acetyl-cytosine, 5-(carboxyhydroxymethyl)uracil, 5-carboxymethylaminomethyl-2-thiouridine, 5-carboxymethylaminomethyluracil, dihydrouracil, β-D-galactosylqueosine, inosine, N6-isopentenyladenine, 1-methylguanine, 1-methylinosine, 2,2-dimethylguanine, 2-methyladenine, 2-methylguanine, 3-methylcytosine, 5-methylcytosine, N6-adenine, 7-methylguanine, 5-methylaminomethyluracil, 5-methoxyaminomethyl-2-thiouracil, β-D-man-nosylqueosine, 5′-methoxycarboxymethyluracil, 5-methoxyuracil, 2-methylthio-N6-iso-pentenyladenine, uracil-5-oxyacetic acid, pseudouracil, queosine, 2-thiocytosine, 5-methyl-2-thiouracil, 2-thiouracil, 4-thiouracil, 5-methyluracil, methyl uracil-5-oxyacetate, uracil-5-oxyacetic acid, 5-methyl-2-thiouracil, 3-(3-amino-3-N-2-carboxypropyl)uracil and 2,6-diaminopurine.

[0238] In a further preferred embodiment, the expression of a protein encoded by one of sequences of FIG. 1a, 1b, 1c or 1d or homologs, analogs, paralogs, orthologs thereof can be inhibited by nucleotide sequences which are complementary to the regulatory region of a gene (for example a promoter and/or enhancer) and which form triplex structures with the DNA-double helix in this region so that the transcription of the gene is reduced. Such methods have been described (Helene C (1991) Anticancer Drug Res. 6(6): 569-84; Helene C et al. (1992) Ann. NY Acad. Sci. 660: 27-36; Maher U (1992) Bioassays 14(12): 807-815).

[0239] In a further embodiment, the antisense nucleic acid molecule can be an α-anomeric nucleic acid. Such x-anomeric nucleic acid molecules form specific double-stranded hybrids with complementary RNA in which—as opposed to the conventional β-nucleic acids—the two strands run in parallel with one another (Gautier C et al. (1987) Nucleic Acids Res. 15: 6625-6641). Furthermore, the antisense nucleic acid molecule can also comprise 2′-O-methylribonucleotides (Inoue et al. (1987) Nucleic Acids Res. 15: 6131-6148) or chimeric RNA-DNA analogs (Inoue et al. (1987) FEBS Lett 215: 327-330).

[0240] The antisense nucleic acid molecules of the invention are typically administered to a cell or generated in situ such that they hybridize with or bind to cellular mRNA and/or genomic DNA encoding a polypeptide having the biological activity of protein of the invention thereby inhibit expression of the protein, e.g., by inhibiting transcription and/or translation and leading to the aforementioned compound X increasing activity.

[0241] The antisense molecule of the present invention comprises also a nucleic acid molecule comprising a nucleotide sequences complementary to the regulatory region of an nucleotide sequence encoding the natural occurring polypeptide of the invention, e.g. the polypeptide sequences shown in the sequence listing, or identified according to the methods described herein, e.g., its promoter and/or enhancers, e.g. to form triple helical structures that prevent transcription of the gene in target cells. See generally, Helene, C. (1991) Anticancer Drug Des. 6(6):569-84; Helene, C. et al. (1992) Ann. N.Y. Acad. Sci. 660:27-36; and Maher, L. J. (1992) Bioassays 14(12):807-15.

[0242] C) Introduction of an Antisense Nucleic Acid Sequence Combined with a Ribozyme

[0243] It is advantageous to combine the above-described antisense strategy with a ribozyme method. Catalytic RNA molecules or ribozymes can be adapted to any target RNA and cleave the phosphodiester backbone at specific positions, thus functionally deactivating the target RNA (Tanner N K (1999) FEMS Microbiol. Rev. 23(3): 257-275). The ribozyme per se is not modified thereby, but is capable of cleaving further target RNA molecules in an analogous manner, thus acquiring the properties of an enzyme. The incorporation of ribozyme sequences into “antisense” RNAs imparts this enzyme-like RNA-cleaving property to precisely these “antisense” RNAs and thus increases their efficiency when inactivating the target RNA. The preparation and the use of suitable ribozyme “antisense” RNA molecules is described, for example, by Haseloff et. al. (1988) Nature 310: 585-591.

[0244] In this manner, ribozymes [for example “Hammerhead” ribozymes; Haselhoff and Gerlach (1988) Nature 310: 585-591] can be used to catalytically cleave the mRNA of an enzyme to be suppressed and to prevent translation. The ribozyme technology can increase the efficacy of an antisense strategy. Methods for expressing ribozymes for reducing specific proteins are described in (EP 0 291 533, EP 0 321 201, EP 0 360 257). Ribozyme expression has also been described for plant cells (Steinecke P et al. (1992). EMBO J 11(4): 1525-1530; de Feyter R et al. (1996) Mol. Gen. Genet. 250(3): 329-338). Suitable target sequences and ribozymes can be identified for example as described by Steinecke P, Ribozymes, Methods in Cell Biology 50, Galbraith et al. eds, Academic Press, Inc. (1995), pp. 449-460 by calculating the secondary structures of ribozyme RNA and target RNA and by their interaction [Bayley C C et al. (1992) Plant Mol. Biol. 18(2): 353-361; Lloyd A M and Davis R W et al. (1994) Mol. Gen. Genet. 242(6): 653-657]. For example, derivatives of the tetrahymena L-19 IVS RNA which have complementary regions to the mRNA of the protein to be suppressed can be constructed (see also U.S. Pat. No. 4,987,071 and U.S. Pat. No. 5,116,742). As an alternative, such ribozymes can also be identified from a library of a variety of ribozymes via a selection process (Bartel D and Szostak J W (1993) Science 261: 1411-1418).

[0245] D) Introduction of a (Sense) Nucleic Acid Sequence for Inducing Cosuppression

[0246] The expression of a nucleic acid sequence in sense orientation can lead to cosuppression of the corresponding homologous, endogenous genes. The expression of sense RNA with homology to an endogenous gene can reduce or indeed eliminate the expression of the endogenous gene, in a similar manner as has been described for the following antisense approaches: Jorgensen et al. [(1996) Plant Mol. Biol. 31 (5): 957-973], Goring et al. [(1991) Proc. Natl. Acad. Sci. USA 88: 1770-1774], Smith et al. [(1990) Mol. Gen. Genet. 224: 447-481], Napoli et al. [(1990) Plant Cell 2: 279-289] or Van der Krol et al. [(1990) Plant Cell 2: 291-99]. In this context, the construct introduced may represent the homologous gene to be reduced either in full or only in part. The application of this technique to plants has been described for example by Napoli et al. [(1990) The Plant Cell 2: 279-289 and in U.S. Pat. No. 5,010,323].

[0247] E) Introduction of Nucleic Acid Sequences Encoding a Dominant-Negative Protein

[0248] The function or activity of a protein can efficiently also be reduced by expressing a dominant-negative variant of said protein. The skilled worker is familiar with methods for reducing the function or activity of a protein by means of coexpression of its dominant-negative form [Lagna G and Hemmati-Brivanlou A (1998) Current Topics in Developmental Biology 36: 75-98; Perlmutter R M and Alberola-Ila J (1996) Current Opinion in Immunology 8(2): 285-90; Sheppard D (1994) American Journal of Respiratory Cell & Molecular Biology 11(1): 1-6; Herskowitz I (1987) Nature 329 (6136): 219-22].

[0249] A dominant-negative variant can be realized for example by changing of an amino acid in the proteins encoded by one of sequences of FIG. 1a, 1b, 1c or 1d or homologs thereof. This change can be determined for example by computer aided comparison (“alignment”). These mutations for achieving a dominant-negative variant are preferably carried out at the level of the nucleic acid sequences. A corresponding mutation can be performed for example by PCR-mediated in-vitro mutagenesis using suitable oligonucleotide primers by means of which the desired mutation is introduced. To this end, methods are used with which the skilled worker is familiar. For example, the “LA PCR in vitro Mutagenesis Kit” (Takara Shuzo, Kyoto) can be used for this purpose. It is also possible and known to those skilled in the art that deleting or changing of functional domains, e.g. TF or other signaling components which can bind but not activate may achieve the reduction of protein activity.

[0250] F) Introduction of DNA- or Protein-Binding Factors Against Genes, RNAs or Proteins

[0251] A reduction in the expression of a gene encoded by one of sequences of FIG. 1a, 1b, 1c or 1d or homologs thereof according to the invention can also be achieved with specific DNA-binding factors, for example factors of the zinc finger transcription factor type. These factors attach to the genomic sequence of the endogenous target gene, preferably in the regulatory regions, and bring about repression of the endogenous gene. The use of such a method makes possible the reduction in the expression of an endogenous gene without it being necessary to recombinantly manipulate the sequence of the latter. Such methods for the preparation of relevant factors are described in Dreier B et al. [(2001) J. Biol. Chem. 276(31): 29466-78 and (2000) J. Mol. Biol. 303(4): 489-502], Beerli R R et al. [(1998) Proc. Natl. Acad. Sci. USA 95(25): 14628-14633; (2000) Proc. Natl. Acad. Sci. USA 97(4): 1495-1500 and (2000) J. Biol. Chem. 275(42): 32617-32627)], Segal D J and Barbas C F [3rd (2000) Curr. Opin. Chem. Biol. 4(1): 10-39], Kang J S and Kim J S [(2000) J. Biol. Chem. 275(12): 8742-8748], Kim J S et al. [(1997) Proc. Natl. Acad. Sci. USA 94(8): 3616-3620], Klug A [(1999) J. Mol. Biol. 293(2): 215-218], Tsai S Y et al. [(1998) Adv. Drug Deliv. Rev. 30(1-3): 23-31], Mapp A K et al. [(2000) Proc. Natl. Acad. Sci. USA 97(8): 3930-3935], Sharrocks A D et al. [(1997) Int. J. Biochem. Cell Biol. 29(12): 1371-1387] and Zhang L et al. [(2000) J. Biol. Chem. 275(43): 33850-33860]. Examples for the application of this technology in plants have been described in WO 01/52620, Ordiz M I et al., (Proc. Natl. Acad. Sci. USA, Vol. 99, Issue 20, 13290-13295, 2002) or Guan et al., (Proc. Natl. Acad. Sci. USA, Vol. 99, Issue 20, 13296-13301, 2002)

[0252] These factors can be selected using any portion of a gene. This segment is preferably located in the promoter region. For the purposes of gene suppression, however, it may also be located in the region of the coding exons or introns. The skilled worker can obtain the relevant segments from Genbank by database search or starting from a cDNA whose gene is not present in Genbank by screening a genomic library for corresponding genomic clones.

[0253] It is also possible to first identify sequences in a target crop which are encoded by one of sequences of FIG. 1a, 1b, 1c or 1d or homologs thereof, then find the promoter and reduce expression by the use of the above mentioned factors.

[0254] The skilled worker is familiar with the methods required for doing so.

[0255] Furthermore, factors which are introduced into a cell may also be those which themselves inhibit the target protein. The protein-binding factors can, for example, be aptamers [Famulok M and Mayer G (1999) Curr. Top Microbiol. Immunol. 243: 123-36] or antibodies or antibody fragments or single-chain antibodies. Obtaining these factors has been described, and the skilled worker is familiar therewith. For example, a cytoplasmic scFv antibody has been employed for modulating activity of the phytochrome A protein in genetically modified tobacco plants [Owen M et al. (1992) Biotechnology (NY) 10(7): 790-794; Franken E et al. (1997) Curr. Opin. Biotechnol. 8(4): 411-416; Whitelam (1996) Trend Plant Sci. 1: 286-272].

[0256] Gene expression may also be suppressed by tailor-made low-molecular-weight synthetic compounds, for example of the polyamide type [Dervan P B and Bürli R W (1999) Current Opinion in Chemical Biology 3: 688-693; Gottesfeld J M et al. (2000) Gene Expr. 9(1-2): 77-91]. These oligomers consist of the units 3-(dimethylamino)propylamine, N-methyl-3-hydroxypyrrole, N-methylimidazole and N-methylpyrroles; they can be adapted to each portion of double-stranded DNA in such a way that they bind sequence-specifically to the large groove and block the expression of the gene sequences located in this position. Suitable methods have been described in Bremer R E et al. [(2001) Bioorg. Med. Chem. 9(8): 2093-103], Ansari A Z et al. [(2001) Chem. Biol. 8(6): 583-92], Gottesfeld J M et al. [(2001) J. Mol. Biol. 309(3): 615-29], Wurtz N R et al. [(2001) Org. Lett 3(8): 1201-3], Wang C C et al. [(2001) Bioorg. Med. Chem. 9(3): 653-7], Urbach A R and Dervan P B [(2001) Proc. Natl. Acad. Sci. USA 98(8): 4103-8] and Chiang S Y et al. [(2000) J. Biol. Chem. 275(32): 24246-54].

[0257] G) Introduction of Viral Nucleic Acid Sequences and Expression Constructs which Bring about the Degradation of RNA

[0258] Inactivation or downregulation can also be efficiently brought about by inducing specific RNA degradation by the organism, advantageously in the plant, with the aid of a viral expression system (Amplikon) [Angell, S M et al. (1999) Plant J. 20(3): 357-362]. Nucleic acid sequences with homology to the transcripts to be suppressed are introduced into the plant by these systems—also referred to as “VIGS” (viral induced gene silencing) with the aid of viral vectors. Then, transcription is switched off, presumably mediated by plant defense mechanisms against viruses. Suitable techniques and methods are described in Ratcliff F et al. [(2001) Plant J. 25(2): 237-45], Fagard M and Vaucheret H [(2000) Plant Mol. Biol. 43(2-3): 285-93], Anandalakshmi R et al. [(1998) Proc. Natl. Acad. Sci. USA 95(22): 13079-84] and Ruiz M T [(1998) Plant Cell 10(6): 937-46].

[0259] H) Introduction of Constructs for Inducing a Homologous Recombination on Endogenous Genes, for Example for Generating Knock-Out Mutants

[0260] To generate a homologously-recombinant organism with reduced activity, a nucleic acid construct is used which, for example, comprises at least part of an endogenous gene which is modified by a deletion, addition or substitution of at least one nucleotide in such a way that the functionality is reduced or completely eliminated. The modification may also affect the regulatory elements (for example the promoter) of the gene so that the coding sequence remains unmodified, but expression (transcription and/or translation) does not take place and is reduced.

[0261] In the case of conventional homologous recombination, the modified region is flanked at its 5′ and 3′ end by further nucleic acid sequences which must be sufficiently long for allowing recombination. Their length is, as a rule, in a range of from one hundred bases up to several kilobases [Thomas K R and Capecchi M R (1987) Cell 51: 503; Strepp et al. (1-998) Proc. Natl. Acad. Sci. USA 95(8): 4368-4373]. In the case of homologous recombination, the host organism—for example a plant—is transformed with the recombination construct using the methods described herein below, and clones which have successfully undergone recombination are selected using for example a resistance to antibiotics or herbicides. Using the cotransformation technique, the resistance to antibiotics or herbicides can subsequently advantageously be re-eliminated by performing crosses. An example for an efficient homologous recombination system in plants has been published in Nat. Biotechnol. 2002 October; 20(10):1030-4, Terada R et al.: Efficient gene targeting by homologous recombination in rice.

[0262] Homologous recombination is a relatively rare event in higher eukaryotes, especially in plants. Random integrations into the host genome predominate. One possibility of removing the randomly integrated sequences and thus increasing the number of cell clones with a correct homologous recombination is the use of a sequence-specific recombination system as described in U.S. Pat. No. 6,110,736, by means of which unspecifically integrated sequences can be deleted again, which simplifies the selection of events which have integrated successfully via homologous recombination. A multiplicity of sequence-specific recombination systems may be used, examples which may be mentioned being Cre/lox system of bacteriophage P1, the FLP/FRT system from yeast, the Gin recombinase of phage Mu, the Pin recombinase from E. coli and the R/RS system of the pSR1 plasmid. The bacteriophage P1 Cre/lox system and the yeast FLP/FRT system are preferred. The FLP/FRT and the cre/lox recombinase system have already been applied to plant systems [Odell et al. (1990) Mol. Gen. Genet. 223: 369-378].

[0263] I) Introduction of Mutations into Endogenous Genes for Bringing about a Loss of Function (for Example Generation of Stop Codons, Reading-Frame Shifts and the Like)

[0264] Further suitable methods for reducing activity are the introduction of nonsense mutations into endogenous genes, for example by introducing RNA/DNA oligonucleotides into the plant [Zhu et al. (2600) Nat. Biotechnol. 18(5): 555-558], and the generation of knock-out mutants with the aid of, for example, T-DNA mutagenesis [Koncz et al. (1992) Plant Mol. Biol. 20(5): 963-976], ENU-(N-ethyl-N-nitrosourea)-mutagenesis or homologous recombination [ENU-(N-ethyl-N-nitrosourea)-mutagenesis or homologous recombination [Hohn B and Puchta (1999) H. Proc. Natl. Acad. Sci. USA 96: 8321-8323]. Point mutations may also be generated by means of DNA-RNA hybrids also known as “chimeraplasty” [Cole-Strauss et al. (1999) Nucl. Acids Res. 27(5): 1323-1330; Kmiec (1999) Gene Therapy American Scientist 87(3): 240-247]. The mutation sites may be specifically targeted or randomly selected.

[0265] Nucleic acid sequences as described in item B) to I) are expressed in the cell or organism by transformation/transfection of the cell or organism or are introduced in the cell or organism by known methods, for example as disclosed in item A).

[0266] Other suitable method for reducing activity is the introduction of a nucleic acid in the plant cell, which interacts with a gene encoded by one or more nucleic acid sequences selected from the group consisting of sequences of FIG. 1a, 1b, 1c or 1d and/or homologs thereof. The interaction of the introduced nucleic acid, which can be active itself, with said gene leads by deletion, inversion or insertion finally to inactivation, i.e. by frameshift, or destruction of said gene.

[0267] In particular, the invention provides a method of producing a transformed plant with a gene encoding nucleic acid, wherein inactivation or down-regulation of said gene(s) in the plant results in increased tolerance to environmental stress, which is preferably achieved by altering metabolic activity, as compared to a wild type plant, comprising the inactivation or down-regulation by mutation of a nucleic acid sequence of FIG. 1a, 1b, 1c or 1d or homologs thereof.

[0268] For such plant transformation, binary vectors such as pBinAR can be used (Höfgen and Willmitzer, 1990Plant Science 66:221-230). Moreover suitable binary vectors are such as pBIN19, pBI101, pGPTV or pPZP (Hajukiewicz, P. et al., 1994, Plant Mol. Biol., 25: 989-994). An overview of binary vectors and their specific features is given in Hellens et al., 2000, Trends in plant science, 5: 446-451.

[0269] Construction of the binary vectors can be performed by ligation of the cDNA in sense or antisense orientation into the T-DNA. 5-prime to the cDNA a plant promoter activates transcription of the cDNA. A polyadenylation sequence is located 3-prime to the cDNA. Tissue-specific expression can be achieved by using a tissue specific promoter as listed below. Also, any other promoter element can be used. For constitutive expression within the whole plant, the CaMV 35S promoter can be used. The expressed protein can be targeted to a cellular compartment using a signal peptide, for example for plastids, mitochondria or endoplasmic reticulum (Kermode, 1996 Crit. Rev. Plant Sci. 4(15):285-423). The signal peptide is cloned 5-prime in frame to the cDNA to archive subcellular localization of the fusion protein. Additionally, promoters that are responsive to abiotic stresses can be used with, such as the Arabidopsis promoter RD29A. One skilled in the art will recognize that the promoter used should be operatively linked to the nucleic acid such that the promoter causes transcription of the nucleic acid which results in the synthesis of a mRNA which encodes a polypeptide. Alternatively, the RNA can be an antisense RNA for use in affecting subsequent expression of the same or another gene or genes.

[0270] Alternate methods of transfection include the direct transfer of DNA into developing flowers via electroporation or Agrobacterium mediated gene-transfer. Agrobacterium mediated plant transformation can be performed using for example the GV3101 (pMP90) (Koncz and Schell, 1986 Mol. Gen. Genet. 204:383-396) or LBA4404 (Ooms et al., Plasmid, 1982, 7: 15-29; Hoekema et al., Nature, 1983, 303: 179-180) Agrobacterium tumefaciens strain. Transformation can be performed by standard transformation and regeneration techniques (Deblaere et al., 1994 Nucl. Acids. Res. 13:4777-4788; Gelvin and Schilperoort, Plant Molecular Biology Manual, 2nd Ed.—Dordrecht: Kluwer Academic Publ., 1995.—in Sect., Ringbuch Zentrale Signatur: BT11-P ISBN 0-7923-2731-4; Glick, B R and Thompson, J E, Methods in Plant Molecular Biology and Biotechnology, Boca Raton: CRC Press, 1993.—360 S., ISBN 0-8493-5164-2). For example, rapeseed can be transformed via cotyledon or hypocotyl transformation (Moloney et al., 1989 Plant Cell Reports 8:238-242; De Block et al., 1989 Plant Physiol. 91:694-701). Use of antibiotics for Agrobacterium and plant selection depends on the binary vector and the Agrobacterium strain used for transformation. Rapeseed selection is normally performed using kanamycin as selectable plant-marker. Agrobacterium mediated gene transfer to flax can be performed using, for example, a technique described by Mlynarova et al., 1994 Plant Cell Report 13:282-285. Additionally, transformation of soybean can be performed using for example a technique described in European Patent No. 0424 047, U.S. Pat. No. 5,322,783, European Patent No. 0397 687, U.S. Pat. No. 5,376,543 or U.S. Pat. No. 5,169,770. Transformation of maize can be achieved by particle bombardment, polyethylene glycol mediated DNA uptake or via the silicon carbide fiber technique. (See, for example, Freeling and Walbot “The maize handbook” Springer Verlag: New York (1993) ISBN 3-540-97826-7). A specific example of maize transformation is found in U.S. Pat. No. 5,990,387 and a specific example of wheat transformation can be found in PCT Application No. WO 93/07256.

[0271] In particular, a useful method to ascertain the level of transcription or activity of the gene (an indicator of the amount of mRNA available for translation to the gene product) is to perform a Northern blot (for reference see, for example, Ausubel et al., 1988 Current Protocols in Molecular Biology, Wiley: New York). This information at least partially demonstrates the degree of transcription of the transformed gene. Total cellular RNA can be prepared from cells, tissues or organs by several methods, all well-known in the art, such as that described in Bormann, E. R. et al., 1992 Mol. Microbiol. 6:317-326. To assess the presence or relative quantity of protein translated from this mRNA, standard techniques, such as a Western blot, may be employed. These techniques are well known to one of ordinary skill in the art. (See for example Ausubel et al., 1988 Current Protocols in Molecular Biology, Wiley: New York). The use of Real Time PCR is also possible.

[0272] The invention may further be combined with an isolated recombinant expression vector comprising a stress related protein encoding nucleic acid, wherein expression of the vector or stress related protein encoding nucleic acid, respectively in a host cell results in increased tolerance and/or resistance to environmental stress, which is preferably achieved by altering metabolic activity, as compared to the wild type of the host cell. As used herein, the term “vector” refers to a nucleic acid molecule capable of transporting another nucleic acid to which it has been linked. One type of vector is a “plasmid”, which refers to a circular double stranded DNA loop into which additional DNA segments can be ligated. Another type of vector is a viral vector, wherein additional DNA segments can be ligated into the viral genome. Certain vectors are capable of autonomous replication in a host cell into which they are introduced (e.g., bacterial vectors having a bacterial origin of replication and episomal mammalian vectors). Other vectors (e.g., non-episomal mammalian vectors) are integrated into the genome of a host cell upon introduction into the host cell, and thereby are replicated along with the host genome. Moreover, certain vectors are capable of directing the expression of genes to which they are operatively linked. Such vectors are referred to herein as “expression vectors”. In general, expression vectors of utility in recombinant DNA techniques are often in the form of plasmids. In the present specification, “plasmid” and “vector” can be used interchangeably as the plasmid is the most commonly used form of vector. However, the invention is intended to include such other forms of expression vectors, such as viral vectors (e.g., replication defective retroviruses), which serve equivalent functions.

[0273] A plant expression cassette comprising a nucleic acid construct, which when expressed allows inactivation or down-regulation of a gene encoded by a nucleic acid selected from the group consisting of sequences of FIG. 1a, 1b, 1 c or 1d and/or homologs thereof and/or parts thereof by a method mentioned above leading to increased stress tolerance and/or resistance, which is preferably achieved by altering metabolic activity, is also included in the scope of the present invention.

[0274] The plant expression cassette preferably contains regulatory sequences capable of driving gene expression in plant cells and operably linked so that each sequence can fulfill its function, for example, termination of transcription by polyadenylation signals. Preferred polyadenylation signals are those originating from Agrobacterium tumefaciens T-DNA such as the gene 3 known as octopine synthase of the Ti-plasmid pTiACH5 (Gielen et al., 1984 EMBO J. 3:835) or functional equivalents thereof but also all other terminators functionally active in plants are suitable.

[0275] Plant gene expression must be operably linked to an appropriate promoter conferring gene expression in a time, cell or tissue specific manner. Preferred promoters are such that drive constitutive expression (Benfey et al., 1989 EMBO J. 8:2195-2202) like those derived from plant viruses like the 35S CaMV (Franck et al., 1980 Cell 21:285-294), the 19S CaMV (see also U.S. Pat. No. 5,352,605 and PCT Application No. WO 8402913) or plant promoters like those from Rubisco small subunit described in U.S. Pat. No. 4,962,028.

[0276] Additional advantageous regulatory sequences are, for example, included in the plant promoters such as CaMV/35S [Franck et al., Cell 21 (1980) 285-294], PRP1 [Ward et al., Plant. Mol. Biol. 22 (1993)], SSU, OCS, lib4, usp, STLS1, B33, LEB4, nos or in the ubiquitin, napin or phaseolin promoter. Additional useful plant promoters are the cytosolic FBPase promoter or ST-LSI promoter of the potato (Stockhaus et al., EMBO J. 8, 1989, 2445), the phosphorybosyl phyrophoshate amido transferase promoter of Glycine max (gene bank accession No. U87999) or the noden specific promoter described in EP-A-0 249 676. Additional particularly advantageous promoters are seed specific promoters which can be used for monocotyledons or dicotyledons. Described in U.S. Pat. No. 5,608,152 (napin promoter from rapeseed), WO 98/45461 (phaseolin promoter from Arobidopsis), U.S. Pat. No. 5,504,200 (phaseolin promoter from Phaseolus vulgaris), WO 91/13980 (Bce4 promoter from Brassica) and Baeumlein et al., Plant J., 2, 2, 1992: 233-239 (LEB4 promoter from leguminosa) are promoters useful in dicotyledons. The following promoters are useful for example in monocotyledons Ipt-2- or Ipt-1-promoter from barley (WO 95/15389 and WO 95/23230) or hordein promoter from barley. Other useful promoters described in WO 99/16890.

[0277] It is possible in principle to inactivate or down-regulate all natural promoters with their regulatory sequences like those mentioned above in order to e.g. reduce the level of production of a targeted protein.

[0278] The construct may also comprise further genes which are to be inserted into the organisms and which are for example involved in stress resistance, i.e. next to inactivating certain genes or incorporating inactivated genes at their place, it is possible to introduce favorable genes that are related to production of proteins which actively increase stress tolerance or resistance. It is therefore feasible and advantageous to insert and express in host organisms regulatory genes such as genes for inducers, repressors or enzymes which intervene by their enzymatic activity in the regulation of one or more or all genes of a biosynthetic pathway. These genes can be heterologous or homologous in origin. The inserted genes may have their own promoter or else be under the control of same promoter as sequences of FIG. 1a, 1b, 1c or 1d or their homologs.

[0279] The gene construct advantageously comprises, for expression of the other genes present, additionally 3′ and/or 5′ terminal regulatory sequences to enhance expression, which are selected for optimal expression depending on the selected host organism and gene or genes.

[0280] These regulatory sequences are intended to make specific expression of the genes and protein expression possible as mentioned above. This may mean, depending on the host organism, for example that the gene is expressed or overexpressed only after induction, or that it is immediately expressed and/or overexpressed.

[0281] The regulatory sequences or factors may moreover preferably have a beneficial effect on expression of the introduced genes, and thus increase it. It is possible in this way for the regulatory elements to be enhanced advantageously at the transcription level by using strong transcription signals such as promoters and/or enhancers. However, in addition, it is also possible to enhance translation by, for example, improving the stability of the mRNA.

[0282] Other preferred sequences for use in plant gene expression cassettes are targeting-sequences necessary to direct the gene product in its appropriate cell compartment (for review see Kermode, 1996 Crit. Rev. Plant Sci. 15(4):285-423 and references cited therein) such as the vacuole, the nucleus, all types of plastids like amyloplasts, chloroplasts, chromoplasts, the extracellular space, mitochondria, the endoplasmic reticulum, oil bodies, peroxisomes and other compartments of plant cells.

TABLE 1
Examples of Tissue-specific and Stress
inducible promoters in plants

| Expression | Reference |
|---|---|
| Cor78- Cold, drought, | Ishitani, et al., Plant Cell 9: 1935-1949 |
| salt, ABA, wounding- | (1997). Yamaguchi-Shinozaki and |
| inducible | Shinozaki, Plant Cell 6: 251-264 (1994). |
| Rci2A - Cold, | Capel et al., Plant Physiol 115: 569-576 |
| dehydration-inducible | (1997) |
| Rd22 - Drought, salt | Yamaguchi-Shinozaki and Shinozaki, Mol |
| | Gen Genet 238: 17-25 (1993). |
| Cor15A - Cold, | Baker et al., Plant Mol. Biol. 24: 701-713 |
| dehydration, ABA | (1994). |
| GH3- Auxin inducible | Liu et al., Plant Cell 6: 645-657 (1994) |
| ARSK1-Root, salt | Hwang and Goodman, Plant J 8: 37-43 |
| inducible | (1995). |
| PtxA - Root, salt | GenBank accession X67427 |
| inducible | |
| SbHRGP3 - Root specific | Ahn et al., Plant Cell 8: 1477-1490 (1998). |
| KST1 - Guard cell | Plesch et al., Plant Journal 28(4): 455-64 |
| specific | (2001). |
| KAT1 - Guard cell | Plesch et al., Gene 249: 83-89 (2000) |
| specific | Nakamura et al., Plant Physiol. 109: |
| | 371-374 (1995) |
| salicylic acid inducible | PCT Application No. WO 95/19443 |
| tetracycline inducible | Gatz et al. Plant J. 2: 397-404 (1992) |
| Ethanol inducible | PCT Application No. WO 93/21310 |
| pathogen inducible PRP1 | Ward et al., 1993 Plant. Mol. Biol. 22: |
| | 361-366 |
| heat inducible hsp80 | U.S. Pat. No. 5187267 |
| cold inducible alpha- | PCT Application No. WO 96/12814 |
| amylase | |
| Wound-inducible pinll | European Patent No. 375091 |
| RD29A - salt-inducible | Yamaguchi-Shinozalei et al. (1993) Mol. |
| | Gen. Genet. 236: 331-100 |
| plastid-specific viral | PCT Application No. WO 95/16783 and |
| RNA-polymerase | WO 97/06250 |

[0283] Selection marker systems, like the AHAS marker or other promoters, e.g. superpromotor (Ni et al., Plant Journal 7, 1995: 661-676), Ubiquitin promoter (Callis et al., J. Biol. Chem., 1990, 265: 12486-12493; U.S. Pat. No. 5,510,474; U.S. Pat. No. 6,020,190; Kawalleck et al., Plant. Molecular Biology, 1993, 21: 673-684) or 10S promoter (GenBank Accession numbers M59930 and X16673) may be similar useful for the combination with the present invention and are known to a person skilled in the art.

[0284] In particular, the present invention describes using the altered metabolic activity by inactivation or down-regulation of genes to engineer stress-tolerant and/or resistant, i.e. drought-, salt- and/or cold-tolerant and/or resistant plants. This strategy has herein been demonstrated for Arabidopsis thaliana, but its application is not restricted to these plants. Accordingly, the invention provides a transformed plant containing one or more (stress related protein encoding) genes selected from sequences of FIG. 1a, 1b, 1c or 1d or homologs thereof, that are inactivated or down-regulated and stress tolerance and/or resistance, which is preferably achieved by altering metabolic activity, wherein the (environmental) stress is drought, increased salt or decreased or increased temperature but its application is not restricted to these adverse environments. Protection against other adverse conditions such as heat, air pollution, heavy metals and chemical toxicants, for example, may be obtained. In particularly preferred embodiments, the environmental stress is drought.

[0285] Growing the modified plants under stress conditions and then screening and analyzing the growth characteristics and/or metabolic activity assess the effect of the genetic modification in plants on stress tolerance and/or resistance. Such analysis techniques are well known to one skilled in the art. They include next to screening (Römpp Lexikon Biotechnologie, Stuttgart/New York: Georg Thieme Verlag 1992, “screening” p. 701) dry weight, wet weight, protein synthesis, carbohydrate synthesis, lipid synthesis, evapotranspiration rates, general plant and/or crop yield, flowering, reproduction, seed setting, root growth, respiration rates, photosynthesis rates, etc. (Applications of HPLC in Biochemistry in: Laboratory Techniques in Biochemistry and Molecular Biology, vol. 17; Rehm et al., 1993 Biotechnology, vol. 3, Chapter III: Product recovery and purification, page 469-714, VCH: Weinheim; Belter, P. A. et al., 1988 Bioseparations: downstream processing for biotechnology, John Wiley and Sons; Kennedy, J. F. and Cabral, J. M. S., 1992 Recovery processes for biological materials, John Wiley and Sons; Shaeiwitz, J. A. and Henry, J. D., 1988 Biochemical separations, in: Ulmann's Encyclopedia of Industrial Chemistry, vol. B3, Chapter-11, page 1-27, VCH: Weinheim; and Dechow, F. J. (1989) Separation and purification techniques in biotechnology, Noyes Publications).

[0286] The methods of the invention may be used to detect environmental stress in plant cells or plants by screening the plant cells for altered metabolic activity as compared to non-stress conditions, which allows for selection of resistant or tolerant plants or plant cells and also provides detection of stress in plants or plant cells before symptoms are visible and damage is high.

[0287] The methods of the invention also allow breeding of plant cells or plants towards increased tolerance and/or resistance to environmental stress by screening the plant cells under stress conditions for altered metabolic activity as compared to non-stress conditions and selecting those with increased tolerance and/or resistance to environmental stress for further replication.

[0288] The engineering of one or more stress related genes of the invention may also result in stress related proteins having altered activities which indirectly impact the stress response and/or stress tolerance of plants. For example, the normal biochemical processes of metabolism result in the production of a variety of products (e.g., hydrogen peroxide and other reactive oxygen species) which may actively interfere with these same metabolic processes (for example, peroxynitrite is known to react with tyrosine side chains, thereby inactivating some enzymes having tyrosine in the active site (Groves, J. T., 1999 Curr. Opin. Chem. Biol. 3(2):226-235). By optimizing the inactivation or down-regulation of one or more stress related genes of the invention, it may be possible to improve the metabolic activity leading to higher stress tolerance and/or resistance of the cell.

[0289] Additionally, the sequences disclosed herein, or fragments thereof, can be targeted to generate knockout mutations in the genomes of various other plant cells (Girke, T., 1998 The Plant Journal 15:39-48). The resultant knockout cells can then be evaluated for their ability or capacity to tolerate various stress conditions, their response to various stress conditions, and the effect on the phenotype and/or genotype of, the mutation. For other methods of gene inactivation see U.S. Pat. No. 6,004,804 “Non-Chimeric Mutational Vectors” and Puttaraju et al., 1999 Spliceosome-mediated RNA trans-splicing as a tool for gene therapy Nature Biotechnology 17:246-252.

[0290] Throughout this application, various publications are referenced. The disclosures of all of these publications and those references cited within those publications in their entireties are hereby incorporated by reference into this application in order to more fully describe the state of the art to which this invention pertains.

[0291] This invention is not limited to specific nucleic acids, specific polypeptides, specific cell types, specific host cells, specific conditions, or specific methods, etc., as such may, of course, vary, and the numerous modifications and variations therein will be apparent to those skilled in the art. It is also to be understood that the terminology used herein is for the purpose of describing specific embodiments only and is not intended to be limiting.

[0292] It should also be understood that the foregoing relates to preferred embodiments of the present invention and that numerous changes may be made therein without departing from the scope of the invention. The invention is further illustrated by the following examples, which are not to be construed in any way as imposing limitations upon the scope thereof. On the contrary, it is to be clearly understood that resort may be had to various other embodiments, modifications, and equivalents thereof, which, after reading the description herein, may suggest themselves to those skilled in the art without departing from the spirit of the present invention and/or the scope of the appended claims.

### EXAMPLE

[0293] Engineering Stress-Tolerant Arabidopsis Plants with Altered Metabolic Activity by Inactivation or Down-Regulation Stress Related Genes.

[0294] Transformation of Arabidopsis thaliana

[0295] Vector Preparation

[0296] A binary vector was constructed based on the modified pPZP binary vector backbone (comprising the kanamycin-gene for bacterial selection; Hajdukiewicz, P. et al., 1994, Plant Mol. Biol., 25: 989-994) and the selection marker bar-gene (De Block et al., 1987, EMBO J. 6, 2513-2518) driven by the mas240 1′ and mas271f promoters (Velten et al., 1984, EMBO J. 3, 2723-2730; Mengiste, Amedeo and Paszkowski, 1997, Plant J., 12, 945-948). The complete vector is shown in FIG. 2.

[0297] Examples of other usable binary vectors for insertional mutagenesis are pBIN19, pBI101, pBinAR or pGPTV. An overview over binary vectors and their specific features is given in Hellens et al., 2000, Trends in plant Science, 5:446-451 and in Guerineau F., Mullineaux P., 1993, Plant transformation and expression vectors in plant molecular biology, LABFAX Series, (Croy R. R. D., ed.) pp. 121-127 Bios Scientific Publishers, Oxford.

[0298] Transformation of Agrobacteria

[0299] The plasmid was transformed into Agrobacterium tumefaciens (GV3101 pMP90; Koncz and Schell, 1986 Mol. Gen. Genet. 204:383-396) using heat shock or electroporation protocols. Transformed colonies were grown on YEB medium and selected by respective antibiotics (Rif/Gent/Km) for 2 d at 28° C. These agrobacteria cultures were used for the plant transformation.

[0300] Arabidopsis thaliana of the ecotype C24 were grown and transformed according to standard conditions (Bechtold, N., Ellis, J., Pelletier, G. 1993. In planta Agrobacterium mediated gene transfer by infiltration of Arabidopsis thaliana plants, C. R. Acad. Sci. Paris 316:1194-1199; Bent, A. F., Clough, J. C., 1998; Floral dip: a simplified method for Agrobacterium-mediated transformation of Arabidopsis thaliana, PLANT J. 16:735-743).

[0301] Transformed plants (F1) were selected by the use of their respective resistance marker. In case of BASTA®-resistance, plantlets were sprayed four times at an interval of 2 to 3 days with 0.02% BASTA® and transformed plants were allowed to set seeds. 50-100 seedlings (F2) were subjected again to marker selection, in case of BASTA-resistance by spaying with 0.1% BASTA® on 4 consecutive days during the plantlet phase. Plants segregating for a single resistance locus (approximately 3:1 resistant seedling to sensitive seedlings) were chosen or further analysis. From these lines three of the resistant seedlings (F2) were again allowed to set seeds and were tested for homozygosis through in-vitro germination of their seeds (F3) on agar medium containing the selection agent (BASTA®, 15 mg/L ammonium glufosinate, Pestanal, Riedel de Haen, Seelze, Germany). Those F2 lines which showed nearly 100% resistant offspring (F3) were considered homozygote and taken for functional analysis.

[0302] Measurement of Stress Tolerance

[0303] Transformed A. thaliana plants were grown individually in pots containing a 4:1 (v/v) mixture of soil and quartz sand in a growth chamber (York Industriekälte GmbH, Mannheim, Germany). To induce germination, sown seeds were kept at 4° C., in the dark, for 3 days. Standard growth conditions were: photoperiod of 16 h light and 8 h dark, 20° C., 60% relative humidity, and a photon flux density of 150 μE. Plants were watered daily until they were approximately 3 weeks old at which time drought was imposed by withholding water. Simultaneously, the relative humidity was reduced in 10% increments every second day to 20%. After approximately 12 days of withholding water, most plants showed visual symptoms of injury, such as wilting and leaf browning, whereas tolerant or resistant plants were identified as being visually turgid and healthy green in color. Plants were scored for symptoms of drought injury in comparison to wild type and neighboring plants for 3-5 days in succession.

[0304] Three successive experiments were conducted. In the first experiment, one individual of each transformed line was tested.

[0305] In the second experiment, the lines that had been scored as tolerant or resistant in the first experiment, i.e. survived longer than the wild type control, were put through a confirmation screen according to the same experimental procedures. In this experiment, max. 5 plants of each tolerant or resistant line were grown and treated as before.

[0306] In the first two experiments, resistance or tolerance was measured compared to neighboring and wild type plants.

[0307] In the third experiment (table 2), at least 15, but usually 20-25 replicates of each confirmed tolerant line, i.e. those that had been scored as tolerant or resistant in the second experiment, were grown and treated as before. In the third-experiment the average and maximum number of days of drought survival after the wild-type control had visually died was determined. Additionally measurements of chlorophyll fluorescence (table 3) were made in stressed and non-stressed plants using a Mini-PAM (Heinz Walz GrmbH, Effeltrich, Germany).

[0308] In the third experiment, after 12 days of drought, the control (non-transformed Arabidopsis thaliana) and most transformed lines in the test showed extreme visual symptoms of stress including necrosis and cell death. Several transformed plants retained viability as shown by their turgid appearance and maintenance of green color.

[0309] Chlorophyll fluorescence measurements of photosynthetic yield (in non-dark adapted plants) confirmed that 14 days of drought stress completely inhibited photosynthesis in the control plants. In most cases the transformed lines maintained photosynthetic function longer (table 3).

[0310] Analysis of the Selected Stress Resistant Lines

[0311] Since the lines were preselected for single insertion loci and a homozygous situation of the resistance marker, the disruption (or mutation) of single genes through the integration of the T-DNA were expected to have lead to the stress-resistant phenotype. Lines which showed a consistent phenotype were chosen for molecular analysis.

[0312] Genomic DNA was purified from approximately 100 mg of leaf tissue from these lines using standard procedures (either spins columns from Qiagen, Hilden, Germany or the Nucleon Phytopure Kit from Amersham Biosciences, Freiburg, Germany). The amplification of the insertion side of the T-DNA was achieved using two different methods. Either by an adaptor PCR-method according to Spertini D, Béliveau C. and Bellemare G., 1999, Biotechniques, 27, 308-314 using T-DNA specific primers LB1 (5′-TGA CGC CAT TTC GCC TTT TCA-3′; SEQ ID 284) for the first and LB2 (5′-CAG AAA TGG-ATA AAT AGC CTT GCT TCC-3′; SEQ ID 285) or RB4-2 (5′-AGC TGG CGT MT AGC GM GAG-3′; SEQ ID 286) for the second round of PCR. Alternatively TAIL-PCR (Liu Y-G, Mitsukawa N, Oosumi T and Whittier R F, 1995, Plant J. 8, 457-463 was preformed. In this case in the first round PCR LB1 (5′-TGA CGC CAT TTC GCC TTT TCA-3′ SEQ ID 284) or RB1-2 (5′-CAA CTT MT CGC CTT GCA GCA CA-3′; SEQ ID 287), for the second round LB2 (5′-CAG MA TGG ATA MT AGC CTT GCT TCC-3′ SEQ ID 285) or RB4-2 (5′-AGC TGG CGT MT AGC GM GAG-3′ SEQ ID 286) and in the last round LB3 (5′-CCA ATA CAT TAC ACT AGC ATC TG-3′; SEQ ID 288) or RB5 (5′-MT GCT AGA GCA GCT TGA-3′; SEQ ID 289) were used as T-DNA specific primers for left or right T-DNA borders respectively.

[0313] Appropriate PCR-products were identified on agarose gels and purified using columns and standard procedures (Qiagen, Hilden, Germany). PCR-products were sequenced with additional T-DNA-specific primers located towards the borders relative to the primers used for amplification. For PCR products containing left border sequences primer LBseq (5′-CM TAC ATT ACA CTA GCA TCT G-3′; SEQ ID 290) and for sequences containing right border sequences primer RBseq (5′-AGA GGC CCG CAC CGA TCG-3′; SEQ ID 291) was used for sequencing reactions. The resulting sequences were taken for comparison with the available Arabidopsis genome sequence from Genbank using the blast algorithm (Altschul et al., 1990. J Mol Biol, 215:403-410).

[0314] Details on PCR products used to identify the genomic locus are given in table 4. Indicated are the identified annotated open reading frame in the Arabidopsis genome, the estimated size of the obtained PCR product (in base pairs), the T-DNA border (LB: left border, RB: right border) for which the amplification was achieved, the method which resulted in the indicated PCR product (explanation see text above), the respective restriction enzymes in case of adaptor PCR, and the degenerated primer in the case of TAIL PCR. Routinely degenerated primers ADP3 (5′-WGTGNAGWANCANAGA-3′; SEQ ID 292), ADP6 (5′-AGWGNAGWANCANAGA-3′; SEQ ID 293) and ADP8 (5′-NTGCGASWGANWAGAA-3′; SEQ ID 294) were used next to the other known primers given in table 4.

[0315] The identification of the insertion locus in each case was confirmed by a control PCR, using a T-DNA-specific primer and a primer deduced from the identified genomic locus, near to the insertion side. The amplification of a PCR-product of the expected size from the insertion line using these two primers proved the disruption of the identified locus by the T-DNA integration.

[0316] Metabolic Analysis of Transgenic Plants

[0317] The described metabolic changes in transgenic plants were identified using the following experimental procedure:

[0318] a) Growth and Treatment of Plants

[0319] Plants were grown in climate chambers under standard conditions on pot soil for three weeks (see above). Eight days prior to harvest, water was withheld for part of the plants (8-day treatment). Four days prior to harvest, water was withheld, for another group of plants (4-day treatment). The plants of “control treatment” were normally watered throughout the growth period. Plants due to be analysed in, the same analytical sequence were grown side-by-side to avoid environmental influences.

[0320] b) Sampling and Storage of Samples

[0321] Sampling took place in the climate chamber. Green parts were cut with a pair of scissors, quickly weighed, and immediately put into a liquid nitrogen pre-cooled extraction thimble. Racks with extraction thimbles were stored at −80° C. until extraction.

[0322] c) Freeze-Drying

[0323] Plants were not allowed to thaw or reach temperatures >−40° C. until either the first contact with solvents or the removal of water by freeze-drying.

[0324] The sample rack with extraction thimbles was put into the pre-cooled (−40° C.) freeze-dryer. The starting temperature for the main drying phase was −35° C., pressure was 0.120 mbar. For the drying process, parameters were changed according to a pressure and temperature program. The final temperature (after 12 hours) was +30° C., pressure was 0.001-0.004 mbar. After shutting down the vacuum pump and cooling machine, the system was aired with dried air or Argon.

[0325] d) Extraction

[0326] Extraction thimbles with plant material were transferred to 5 mL extraction cells on the ASE (Accelerated Solvent Extractor ASE 200 with Solvent Controller and AutoASE-Software (DIONEX)) immediately after freeze-drying.

[0327] Polar substances were extracted with approximately 10 mL Methanol/Water (80/20, v/v) at T=70° C. und p=140 bar, 5 min heating phase, 1 min static Extraction. Lipid substances were extracted with approximately 10 mL Methanol/Dichlormethan (40/60, v/v) at T=70° C. und p=140 bar, 5 min heating phase, 1 min static Extraction. Both extracts were collected in one extraction vial (Centrifuge tubes, 50 mL with screw-on lid and Septum for ASE (DIONEX)).

[0328] The following internal standards were added to the extracts: LC-Standards L-Methionine-d3, Boc-Ala-Gly-Gly-Gly-OH, L-Tryptophan-d5, Arginine 13C615N4, CoEnzyme Q1,2,4 and ribitol, L-glycine-2,2-d2. L-alanine-2,3,3,3-d4, alpha-methyl-glucopyranoside, nonadecanoic acid methyl ester, undecanoic acid methyl ester, tridecanoic acid, pentadecanoic acid, nonacosanoic acid. To the resulting mixture, 8 mL water-were added. The solid residues of plant and extraction thimble were discarded.

[0329] The extract was centrifuged at 1400 g for 5-10 minutes to speed-up phase-separation. For GC and LC analysis, 1 mL each was taken from the colourless methanol/water upper (polar) phase. The remaining upper phase was discarded. Of the dark-green, organic bottom phase 0.5 mL was taken for GC and LC analysis, respectively. All sample aliquots were evaporated using a IR-Dancer Infrared vacuum evaporator (Hettich), using a temperature maximum of 40° C. and a maximum pressure of 10 mbar.

[0330] e) LC/MS- and LC/MS/MS-Analysis

[0331] HPLC mobile phase was added to the lipid and polar residues, respectively (volume adjusted to the weighted sample) and an HPLC analysis using gradient elution was performed.

[0332] f) Derivatisation of the Lipid Phase for GC/MS-Analysis

[0333] For transmethanolysis, a mixture of 140 μl chloroform, 38 μL HCl (37% HCl in water), 320 μl methanol and 20 μl toluol was added to the residue. The sample container was carefully closed and reaction was carried out at 100° C. for 2 hours. Subsequently, the solution was evaporated and the pellet was dried completely.

[0334] The methoximation of carbonyl groups was achieved by a reaction with 100 μL methoxyamine-hydrochloride (5 mg/mL in Pyridine) for 1.5 hours at 60° C., in a closed vial. 20 μL of a mixture of linear, odd-numbered fatty acids was added to provide a time standard. Finally, derivatisation with 100 μL N-Methyl-N-(trimethylsilyl)-2,2,2-trifluoracetamide (MSTFA) took place in a closed vial for 30 minutes at 60° C. The final volume for GC injection was 220 μl.

[0335] g) Derivatisation of the Polar Phase for GC/MS-Analysis

[0336] The methoximation of carbonyl groups was achieved by a reaction with 50 μL methoxyamine-hydrochloride (5 mg/mL in Pyridine) for 1.5 hours at 60° C., in a closed vial. 10 μL of a mixture of linear, odd-numbered fatty acids was added to provide a time standard. Finally, derivatisation with 50 μL N-methyl-N-(trimethylsilyl)-2,2,2-trifluoracetamide (MSTFA) took place in a closed vial for 30 minutes at 60° C. The final volume for GC injection was 110

[0337] h) Analysis of Different Plant Samples

[0338] Samples were measured in sequences of 20. Each sequence contained 5 wild type and 5 transgenic plants grown under control-conditions, as well as 5 wild type and 5 transgenic plants from either the 4 day or 8 day drought treatment.

[0339] The peak height or peak area of each analyte (metabolite) was divided through the peak area of the respective internal standards. Data was normalized using the individual sample fresh weight. The resulting values were divided by the mean values found for wild type plants grown under control conditions and analysed in the same sequence, resulting in the so-called X-folds or ratios (see table 5), which represent values independent of the analytical sequence. These ratios indicate the behavior of the metabolite concentration of the target plants in comparison to the concentration in the wild type control plants.

[0340] All the sequence listings disclosed in this application are submitted on a compact disc (in duplicate) the content of which is incorporated in its entirety herein.

[0341] In table 5 the results of the metabolite screening for the plants transformed in gene F19K19.13 are shown

[0342] Tables 2-5:

TABLE 2
Duration of survival of transformed Arabidopsis thaliana after
imposition of drought stress on 3-week-old plants. Drought tolerance
was measured visually at daily intervals. Survival duration is the
average of all plants that survived longer than the wild type control.
The Maximum duration is the longest period that any single transformed
plant survived longer than the wild type control.

| SEQ | | | | |
|---|---|---|---|---|
| ID | | Plants | Average days of | Maximum days |
| No. | Gene | tested | survival after WT | of survival |
| | CONTROL | — | 0 | 0 |
| 1 | At1g61800 | 24 | 0.83 | 3 |
| 3 | At1g61810 | 24 | 0.83 | 3 |
| 5 | At5g65610 | 24 | 0.46 | 2 |
| 7 | At5g65600 | 24 | 0.46 | 2 |
| 9 | At2g22530 | 24 | 2.08 | 6 |
| 11 | At2g22540 | 24 | 2.08 | 6 |
| 13 | At3g57590 | 24 | 1.04 | 5 |
| 15 | At3g62170 | 24 | 1.88 | 7 |
| 17 | At3g62180 | 24 | 1.88 | 7 |
| 19 | At1g10120 | 24 | 1.21 | 4 |
| 21 | At1g10130 | 24 | 1.21 | 4 |
| 23 | At1g07710 | 11 | 2.72 | 6 |
| 25 | At1g07420 | 11 | 2.72 | 6 |
| 27 | At2g26890 | 45 | 2.33 | 6 |
| 29 | At2g35050 | 45 | 2.33 | 6 |
| 31 | At5g44860 | 45 | 2.33 | 6 |
| 33 | At5g44870 | 45 | 2.33 | 6 |
| 35 | At1g73490 | 24 | 0.88 | 5 |
| 37 | At1g73480 | 24 | 0.88 | 5 |
| 39 | At5g22400 | 100 | 1.6 | 4 |
| 41 | At5g22430 | 100 | 1.6 | 4 |
| 43 | At5g67210 | 100 | 1.6 | 4 |
| 45 | At5g67220 | 100 | 1.6 | 4 |
| 47 | At1g15820 | 11 | 1.82 | 4 |
| 49 | At1g15825 | 11 | 1.82 | 4 |
| 51 | At5g02470 | 19 | 0.95 | 3 |
| 53 | At5g02480 | 19 | 0.95 | 3 |
| 55 | At3g49120 | 25 | 0.6 | 3 |
| 57 | T2J13_50 | 25 | 0.6 | 3 |
| 59 | At2g25970 | 25 | 0.32 | 1 |
| 61 | dl4495c | 25 | 0.96 | 2 |
| 63 | dl4500c | 25 | 0.96 | 2 |
| 65 | At3g11170 | 25 | 0.76 | 2 |
| 67 | AT1G77310 | 25 | 0.76 | 2 |
| 69 | AT1G77320 | 25 | 0.76 | 2 |
| 71 | At2g20210 | 25 | 1.08 | 2 |
| 73 | At2g20200 | 25 | 1.08 | 2 |
| 75 | AT5g47370 | 25 | 1.08 | 2 |
| 77 | At4g33200 | 25 | 0.88 | 3 |
| 79 | At5g45340 | 25 | 0.88 | 3 |
| 81 | AT5G45810 | 25 | 0.72 | 2 |
| 83 | AT5G45820 | 25 | 0.72 | 2 |
| 85 | At2g02370 | 24 | 2.46 | 7 |
| 87 | AT5G39460 | 24 | 1.38 | 5 |
| 89 | MUL8.15 | 24 | 1.38 | 5 |
| 91 | F19K19.13 | 24 | 1.8 | 4 |
| | (At1g16540) | | | |
| 93 | MLP3.2 | 49 | 4.1 | 6 |
| | (At3g07575) | | | |
| 95 | F13K23.5 | 18 | 1.7 | 4 |
| | (At1g12800) | | | |
| 97 | MYJ24.7 | 24 | 1.0 | 4 |
| | (At5g23080) | | | |
| 99 | MBB18.23 | 24 | 1.1 | 3 |
| | (At5g38680) | | | |
| 101 | At2g28470 | 15 | 1.2 | 4 |
| 103 | F9F8.1 | 27 | 1.0 | 3 |
| | (At3g11210) | | | |
| 105 | F17C15_150 | 24 | 1.3 | 5 |
| | (At5g03730) | | | |
| 107 | At2g42690 | 24 | 0.9 | 4 |
| 109 | At4g31810 | 48 | 8.3 | 12 |
| 111 | At4g31820 | 48 | 8.3 | 12 |

[0343] TABLE 3
Photosynthetic yield as determined by chlorophyll florescence of transformed
Arabidopsis thaliana after imposition of drought stress on 3-week-old plants.
Measurements were taken at intervals after withholding water and reported as
photosynthetic yield (Y). Values are the average of 5 randomly selected plants.
These are compared to the MC24 strain for reference.

| | | Photosynthetic | | Photosynthetic | | Photosynthetic | |
|---|---|---|---|---|---|---|---|
| | | yield 6 days | | yield 10 days | | yield 14 days | |
| SEQ ID | | after final | MC24 | after final | MC24 | after final | MC24 |
| No. | Gene | watering | Reference | watering | Reference | watering | Reference |
| 1 | At1g61800 | 751 | 623 | 401 | 100 | | |
| 3 | At1g61810 | 751 | 623 | 401 | 100 | | |
| 5 | At5g65610 | 770 | 757 | 552 | 610 | | |
| 7 | At5g65600 | 770 | 757 | 552 | 610 | | |
| 9 | At2g22530 | 762 | 757 | 775 | 610 | 134 | 16 |
| 11 | At2g22540 | 762 | 757 | 775 | 610 | 134 | 16 |
| 13 | At3g57590 | 770 | 757 | 757 | 610 | | |
| 15 | At3g62170 | 766 | 757 | 734 | 610 | 152 | 16 |
| 17 | At3g62180 | 766 | 757 | 734 | 610 | 152 | 16 |
| 23 | At1g07710 | 779 | 757 | 752 | 610 | 305 | 16 |
| 25 | At1g07420 | 779 | 757 | 752 | 610 | 305 | 16 |
| 27 | At2g26890 | 779 | 765 | 730 | 413 | 292 | 54 |
| 29 | At2g35050 | 764 | 765 | 730 | 413 | 292 | 54 |
| 31 | At5g44860 | 764 | 765 | 730 | 413 | 292 | 54 |
| 33 | At5g44870 | 764 | 765 | 730 | 413 | 292 | 54 |
| 35 | At1g73490 | 764 | 314 | | | | |
| 37 | At1g73480 | 757 | 314 | | | | |
| 47 | At1g15820 | 757 | 757 | 536 | 610 | 148 | 16 |
| 49 | At1g15825 | 745 | 757 | 536 | 610 | 148 | 16 |
| 51 | At5g02470 | 745 | 783 | 290 | 210 | | |
| 53 | At5g02480 | 775 | 783 | 290 | 210 | | |
| 55 | At3g49120 | 775 | 783 | 265 | 210 | | |
| 57 | T2J13_50 | 787 | 783 | 265 | 210 | | |
| 59 | At2g25970 | 787 | 783 | 723 | 210 | | |
| 61 | dl4495c | 784 | 783 | 597 | 210 | | |
| 63 | dl4500c | 784 | 783 | 597 | 210 | | |
| 65 | At3g11170 | 784 | 783 | 666 | 210 | | |
| 67 | AT1G77310 | 763 | 783 | 666 | 210 | | |
| 69 | AT1G77320 | 763 | 783 | 666 | 210 | | |
| 71 | At2g20210 | 763 | 783 | 731 | 210 | | |
| 73 | At2g20200 | 762 | 783 | 731 | 210 | | |
| 75 | AT5g47370 | 762 | 783 | 731 | 210 | | |
| 77 | At4g33200 | 762 | 783 | 409 | 210 | | |
| 79 | At5g45340 | 792 | 783 | 409 | 210 | | |
| 81 | AT5G45810 | 792 | 783 | 585 | 210 | | |
| 83 | AT5G45820 | 766 | 783 | 585 | 210 | | |
| 85 | At2g02370 | 766 | 750 | 734 | 576 | 186 | 31 |
| 87 | AT5G39460 | 723 | 750 | 735 | 576 | 143 | 31 |
| 89 | MUL8.15 | 740 | 750 | 735 | 576 | 143 | 31 |
| 91 | F19K19.13 | 772 | 757 | 792 | 610 | | |
| 93 | MLP3.2 | 786 | 794 | 774 | 413 | 696 | 54 |
| 95 | F13K23.5 | 734 | 623 | 574 | 100 | | |
| 97 | MYJ24.7 | 775 | 757 | 699 | 610 | | |
| 99 | MBB18.23 | 767 | 757 | 748 | 610 | | |
| 101 | At2g28470 | 747 | 623 | 305 | 100 | | |
| 103 | F9F8.1 | 731 | 765 | 798 | 794 | 676 | 413 |
| 105 | F17C15_150 | 759 | 757 | 639 | 610 | 148 | 107 |
| 107 | At2g42690 | 736 | 623 | 206 | 100 | | |
| 109 | At4g31810 | 779 | 794 | 776 | 413 | 740 | 54 |
| 111 | At4g31820 | 779 | 794 | 776 | 413 | 740 | 54 |

[0344] TABLE 4
Details on PCR products used to identify the down-regulated genomic locus.

| SEQ | | Length | | Sequence | | | | Restriction enzyme |
|---|---|---|---|---|---|---|---|---|
| ID No. | Gene | PCR Product | | lenth | | Border | Method | or deg. Primer |
| 1 | At1g61800 | 700 | bp | 584 | bp | LB | Adaptor | MunI |
| 1 | At1g61800 | 700 | bp | 588 | bp | LB | Adaptor | MunI |
| 3 | At1g61810 | 700 | bp | 588 | bp | LB | Adaptor | MunI |
| 5 | At5g65610 | 1500 | bp | 603 | bp | LB | Adaptor | Psp1406I/Bsp119I |
| 5 | At5g65610 | 1000 | bp | 697 | bp | RB | Adaptor | BgIII |
| 5 | At5g65610 | 1000 | bp | 175 | bp | RB | Adaptor | BgIII |
| 7 | At5g65600 | 1000 | bp | 175 | bp | RB | Adaptor | BgIII |
| 9 | At2g22530 | 550 | bp | 465 | bp | LB | Adaptor | Psp1406I/Bsp119I |
| 9 | At2g22530 | 550 | bp | 444 | bp | LB | Adaptor | Psp1406I/Bsp119I |
| 11 | At2g22540 | 550 | bp | 444 | bp | LB | Adaptor | Psp1406I/Bsp119I |
| 13 | At3g57590 | 950 | bp | 842 | bp | LB | Adaptor | SpeI |
| 13 | At3g57590 | 900 | bp | 863 | bp | LB | Adaptor | SpeI |
| 15 | At3g62170 | 700 | bp | 450 | bp | LB | Adaptor | Psp1406I/Bsp119I |
| 15 | At3g62170 | 700 | bp | 419 | bp | LB | Adaptor | Psp1406I/Bsp119I |
| 18 | At3g62180 | 700 | bp | 450 | bp | LB | Adaptor | Psp1406I/Bsp119I |
| 19 | At1g10120 | 700 | bp | 161 | bp | LB | Adaptor | Psp1406I/Bsp119I |
| 19 | At1g10120 | 700 | bp | 161 | bp | LB | Adaptor | Psp1406I/Bsp119I |
| 19 | At1g10120 | 1400 | bp | 718 | bp | LB | Adaptor | SpeI |
| 21 | At1g10130 | 1400 | bp | 718 | bp | LB | Adaptor | SpeI |
| 23 | At1g07710 | 1300 | bp | 628 | bp | LB | Adaptor | MunI |
| 23 | At1g07710 | 1300 | bp | 678 | bp | LB | Adaptor | MunI |
| 25 | At1g07420 | 350 | bp | 251 | bp | RB | Adaptor | SpeI |
| 25 | At1g07420 | 350 | bp | 252 | bp | RB | Adaptor | SpeI |
| 27 | At2g26890 | 700 | bp | 615 | bp | LB | Adaptor | Psp1406I/Bsp119I |
| 27 | At2g26890 | 1200 | bp | 637 | bp | LB | Adaptor | MunI |
| 29 | At2g35050 | 500 | bp | 445 | bp | RB | Adaptor | Psp1406I/Bsp119I |
| 31 | At5g44860 | 400 | bp | 299 | bp | RB | Adaptor | BgIII |
| 31 | At5g44860 | 400 | bp | 297 | bp | RB | Adaptor | BgIII |
| 33 | At5g44870 | 400 | bp | 297 | bp | RB | Adaptor | BgIII |
| 35 | At1g73490 | 330 | bp | 244 | bp | LB | Adaptor | SpeI |
| 35 | At1g73490 | 650 | bp | 494 | bp | RB | Adaptor | MunI |
| 37 | At1g73480 | 650 | bp | 494 | bp | RB | Adaptor | MunI |
| 39 | At5g22400 | 850 | bp | 378 | bp | LB | Adaptor | BgIII |
| 41 | At5g22430 | 850 | bp | 378 | bp | LB | Adaptor | BgIII |
| 43 | At5g67210 | 900 | bp | 471 | bp | RB | TAIL | ADP3 |
| 43 | At5g67210 | 850 | bp | 471 | bp | RB | TAIL | ADP6 |
| 45 | At5g67220 | 850 | bp | 471 | bp | RB | TAIL | ADP6 |
| 47 | At1g15820 | 600 | bp | 456 | bp | LB | Adaptor | BgIII |
| 47 | At1g15820 | 600 | bp | 284 | bp | LB | Adaptor | BgIII |
| 49 | At1g15825 | 600 | bp | 456 | bp | LB | Adaptor | BgIII |
| 51 | At5g02470 | 2000 | bp | 170 | bp | RB | Adaptor | BgI II |
| 53 | At5g02480 | 2000 | bp | 170 | bp | RB | Adaptor | BgI II |
| 55 | At3g49120 | 950 | bp | 720 | bp | LB | Adaptor | Mun I |
| 57 | T2J13_50 | 950 | bp | 720 | bp | LB | Adaptor | Mun I |
| 59 | At2g25970 | 1100 | bp | 684 | bp | LB | Adaptor | Spe I |
| 61 | dl4495c | 580 | bp | 455 | bp | LB | Adaptor | Psp1406 I/Bsp119 I |
| 63 | dl4500c | 580 | bp | 455 | bp | LB | Adaptor | Psp1406 I/Bsp119 I |
| 65 | At3g11170 | 300 | bp | 207 | bp | LB | Adaptor | BgI II |
| 67 | AT1G77310 | 900 | bp | 401 | bp | LB | Tail | ADP8 |
| 69 | AT1G77320 | 900 | bp | 401 | bp | LB | Tail | ADP8 |
| 71 | At2g20210 | 460 | bp | 358 | bp | RB | Adaptor | Mun I |
| 73 | At2g20200 | 460 | bp | 358 | bp | RB | Adaptor | Mun I |
| 75 | AT5g47370 | 800 | bp | 607 | bp | LB | Adaptor | Mun I |
| 77 | At4g33200 | 800 | bp | 566 | bp | LB | Adaptor | BgI II |
| 79 | At5g45340 | 1200 | bp | 558 | bp | RB | Adaptor | BgI II |
| 81 | AT5G45810 | 800 | bp | 647 | bp | LB | Adaptor | BgI II |
| 83 | AT5G45820 | 800 | bp | 647 | bp | LB | Adaptor | BgI II |
| 85 | At2g02370 | 1300 | bp | 548 | bp | LB | Adaptor | Psp1406 I/Bsp 119 I |
| 87 | AT5G39460 | 700 | bp | 548 | bp | LB | Adaptor | BgI II |
| 89 | MUL8.15 | 700 | bp | 548 | bp | LB | Adaptor | BgI II |
| 91 | F19K19.13 | 400 | bp | 254 | bp | LB | Adaptor | BgIiI |
| 91 | F19K19.13 | 400 | bp | 256 | bp | LB | Adaptor | BgIII |
| 91 | F19K19.13 | 700 | bp | 625 | bp | RB | Adaptor | SpeI |
| 91 | F19K19.13 | 700 | bp | 479 | bp | RB | Adaptor | SpeI |
| 93 | MLP3.2 | 300 | bp | 212 | bp | LB | TAIL | ADP3 |
| 93 | MLP3.2 | 550 | bp | 419 | bp | RB | Adaptor | BgIII |
| 93 | MLP3.2 | 500 | bp | 362 | bp | RB | Adaptor | MunI |
| 93 | MLP3.2 | 450 | bp | 361 | bp | RB | Adaptor | MunI |
| 95 | F13K23.5 | 1600 | bp | 585 | bp | LB | Adaptor | MunI |
| 97 | MYJ24.7 | 550 | bp | 432 | bp | LB | Adaptor | BgIII |
| 99 | MBB18.23 | 1000 | bp | 458 | bp | LB | Adaptor | MunI |
| 99 | MBB18.23 | 1000 | bp | 723 | bp | LB | Adaptor | MunI |
| 99 | MBB18.23 | 550 | bp | 442 | bp | LB | Adaptor | Psp1406I/Bsp119I |
| 99 | MBB18.23 | 600 | bp | 450 | bp | LB | Adaptor | Psp1406I/Bsp119I |
| 101 | At2g28470 | 1100 | bp | 652 | | LB | Adaptor | Psp1406/Bsp119 |
| 103 | F9F8.1 | 1000 | bp | 518 | bp | LB | Adaptor | SpeI |
| 103 | F9F8.1 | 1000 | bp | 550 | bp | LB | Adaptor | SpeI |
| 105 | F17C15_150 | 850 | bp | 607 | bp | LB | Adaptor | BgIII |
| 105 | F17C15_150 | 1100 | bp | 402 | bp | LB | Adaptor | MunI |
| 107 | At2g42690 | 500 | bp | 444 | | LB | TAIL | ADP8 |
| 109 | At4g31810 | 1100 | bp | 590 | bp | LB | TAIL | ADP8 |
| 109 | At4g31810 | 650 | bp | 579 | bp | RB | TAIL | ADP8 |
| 111 | At4g31820 | 650 | bp | 579 | bp | RB | TAIL | ADP8 |

[0345] TABLE 5
Details on screening of metabolic activity (F19K19.13).

| | wild type | | | f19k19.13 | | |
|---|---|---|---|---|---|---|
| metabolite | control | 4 days | 8 days | control | 4 days | 8 days |
| 2,3-dimethyl-5-phytylquinol | 1.00 | 0.50 | 0.54 | | | 1.92 |
| 2-hydroxy-palmitic acid | 1.00 | 1.11 | 1.25 | 1.33 | 1.59 | 1.93 |
| 3,4-dihydroxyphenylalanine (=dopa) | 1.00 | 1.83 | 3.37 | | | |
| 3-hydroxy-palmitic acid | 1.00 | | | | | |
| 5-oxoproline | 1.00 | 1.56 | 1.81 | 2.42 | 2.89 | |
| alanine | 1.00 | 0.64 | 0.64 | 1.45 | 1.25 | |
| alpha linolenic acid (c18:3 (c9, c12, c15)) | 1.00 | 1.24 | 1.40 | 1.27 | 1.65 | 1.85 |
| alpha-tocopherol | 1.00 | 1.05 | 1.14 | | | |
| aminoadipic acid | 1.00 | 1.73 | 1.65 | | | |
| anhydroglucose | 1.00 | 1.02 | 1.16 | 1.42 | | |
| arginine | 1.00 | 0.39 | 0.33 | | 0.85 | |
| aspartic acid | 1.00 | 2.72 | 2.96 | 2.94 | 4.27 | 10.08 |
| beta-apo-8′ carotenal | 1.00 | 1.21 | 1.22 | | | |
| beta-carotene | 1.00 | 1.25 | 1.26 | | | 1.91 |
| beta-sitosterol | 1.00 | 1.39 | 1.51 | | | 1.82 |
| beta-tocopherol | 1.00 | 0.54 | 0.60 | | | 3.13 |
| palmitic acid | 1.00 | 1.07 | 1.25 | | | |
| (delta-7-cis,10-cis)-hexadecadienic acid | 1.00 | 1.01 | 1.04 | | | |
| (c16:2 me) | | | | | | |
| hexadecatrienic acid (c16:3 me) | 1.00 | 1.19 | 1.29 | | 1.46 | 1.57 |
| margaric acid (c17:0 me) | 1.00 | 1.19 | 1.28 | 1.24 | | 1.79 |
| delta-15-cis-tetracosenic acid (c24:1 me) | 1.00 | 1.16 | 1.34 | 1.13 | 1.71 | 1.81 |
| campesterol | 1.00 | 1.32 | 1.65 | 1.75 | 2.46 | 3.21 |
| cerotic acid (c26:0) | 1.00 | 0.74 | 1.00 | 0.38 | | |
| citrulline | 1.00 | 0.51 | 0.33 | 1.88 | 1.70 | |
| cryptoxanthine | 1.00 | 1.00 | 0.90 | | | |
| eicosenoic acid (20:1) | 1.00 | 0.81 | 0.81 | | | |
| ferulic acid | 1.00 | 1.37 | 1.47 | 1.66 | 2.62 | |
| fructose | 1.00 | 14.10 | 19.78 | | | |
| fumarat | 1.00 | 5.19 | 9.33 | | | |
| galactose | 1.00 | 1.29 | 1.42 | | | |
| g-aminobutyric acid | 1.00 | 1.16 | 1.32 | 1.62 | 2.21 | 5.00 |
| gamma - tocopherol | 1.00 | 0.54 | 0.60 | | | 1.69 |
| gluconic acid | 1.00 | 2.24 | 3.08 | | | |
| glucose | 1.00 | 14.97 | 20.73 | | | |
| glutamine | 1.00 | 0.98 | 1.17 | 2.88 | 4.90 | |
| glutamic acid | 1.00 | 2.01 | 2.69 | 2.49 | 6.81 | |
| glycerate | 1.00 | 1.87 | 2.04 | 0.85 | 1.21 | |
| glycerinaldehyd | 1.00 | 1.11 | 1.12 | 1.56 | 2.59 | 4.80 |
| glycerol | 1.00 | 1.22 | 1.29 | | | |
| glycerol-3-phosphate | 1.00 | 1.86 | 2.41 | 1.90 | | |
| glycine | 1.00 | 0.25 | 0.26 | | | |
| homoserine | 1.00 | 0.61 | 0.69 | | | |
| inositol | 1.00 | 4.19 | 6.32 | 2.02 | 5.03 | 21.68 |
| isoleucine | 1.00 | 1.28 | 1.66 | 1.44 | 1.96 | 8.02 |
| iso-maltose | 1.00 | 2.63 | 3.02 | | | |
| isopentenyl pyrophosphate | 1.00 | 1.80 | 2.62 | 1.79 | 3.48 | |
| leucine | 1.00 | 1.34 | 1.74 | 1.59 | 2.33 | 6.58 |
| lignoceric acid (c24:0) | 1.00 | 0.91 | 1.02 | | | |
| linoleic acid (c18:2 (c9, c12)) | 1.00 | 1.19 | 1.38 | | 1.41 | 1.66 |
| luteine | 1.00 | 1.26 | 1.33 | | | |
| lycopene | | | | | 1.68 | 1.84 |
| malate | 1.00 | 2.91 | 3.46 | 1.72 | | |
| mannose | 1.00 | 16.40 | 17.80 | 2.56 | | 79.91 |
| melissinsäure | 1.00 | 1.26 | 1.23 | | | |
| methionine | 1.00 | 1.13 | 1.12 | 1.64 | | |
| methylgalactofuranoside | 1.00 | 1.24 | 1.49 | | 1.68 | 1.84 |
| methylgalactopyranoside | 1.00 | 1.25 | 1.36 | | 1.37 | 1.70 |
| palmitic acid (c16:0) | 1.00 | 1.16 | 1.38 | 1.23 | 1.61 | 1.98 |
| phenylalanine | 1.00 | 0.92 | 1.10 | | | |
| phosphate | 1.00 | 2.15 | 2.73 | 2.37 | 7.31 | 11.38 |
| proline | 1.00 | 1.23 | 4.77 | 2.23 | 4.26 | |
| putrescine | 1.00 | | 0.39 | | | |
| pyruvate | 1.00 | 1.30 | 1.21 | | | |
| raffinose | 1.00 | 17.04 | 74.78 | | 7.06 | |
| ribonsäure | 1.00 | 2.32 | 3.43 | | | |
| serine | 1.00 | 0.98 | 1.13 | 1.47 | 1.68 | |
| shikimate | 1.00 | 1.11 | 1.07 | 0.85 | 0.79 | 0.71 |
| sinapine acid | 1.00 | 2.74 | 3.44 | 1.30 | 1.87 | |
| stearic acid (c18:0) | 1.00 | 1.18 | 1.35 | 1.16 | 1.36 | 1.79 |
| succinate | 1.00 | 2.98 | 3.49 | 2.01 | | |
| sucrose | 1.00 | 1.42 | 1.70 | 1.46 | 2.60 | 3.87 |
| threonine | 1.00 | 1.26 | 1.68 | 3.28 | 4.06 | |
| tryptophane | 1.00 | 1.13 | 1.89 | | 1.86 | |
| tyrosine | 1.00 | 1.56 | 2.01 | 1.46 | | |
| ubichinone | 1.00 | 1.02 | 1.20 | | | 3.13 |
| udp-glucose | 1.00 | 1.53 | 1.94 | 2.02 | 4.85 | |
| valine | 1.00 | 0.98 | 1.18 | 1.51 | 1.75 | 3.18 |
| zeaxanthine | 1.00 | 1.27 | 1.34 | | | |

1. A transformed plant cell with altered metabolic activity compared to a corresponding non transformed wild type plant cell, wherein the metabolic activity is altered by an inactivated or down-regulated gene and results in increased tolerance and/or resistance to an environmental stress as compared to a corresponding non-transformed wild type plant cell.

2. The transformed plant cell of claim 1, wherein metabolic activity is altered by one or more inactivated or down-regulated genes encoded by one or more nucleic acid sequences selected from the group consisting of:
a) nucleic acid molecule encoding the polypeptide shown in SEQ ID NO 2, 4, 6, 8, 10, 12, 14, 16, 18, 20, 22, 24, 26, 28, 30, 32, 34, 36, 38, 40, 42, 44, 46, 48, 50, 52, 54, 56, 58, 60, 62, 64, 66, 68, 70, 72, 74, 76, 78, 80, 82, 84, 86, 88 and/or 90 and/or
92, 94, 96, 98, 100, 102, 104, 106, 108, 110 and/or 112 and/or 115, 119, 121, 123, 125, 127, 129, 135, 137, 139, 141, 143, 145, 149, 151, 153, 155, 157, 159, 161, 165, 167, 169, 174, 176, 179, 181, 183, 185, 187, 189, 191, 193, 195, 197, 199, 201, 203, 205, 207, 209, 215, 217, 219, 225, 227, 229, 231, 233, 235, 237, 239, 241, 245, 247, 249, 251, 253, 255, 257, 259, 261, 263, 265, 267, 269, 271, 273, 274, 276, 278, 281 and/or 283 and/or
117, 131, 133, 147, 163, 178, 211, 213, 221, 223, 243 and/or 280
b) nucleic acid molecule comprising the nucleic acid molecule shown in SEQ ID NO
1, 3, 5, 7, 9, 11, 13, 15, 17, 19, 21, 23, 25, 27, 29, 31, 33, 35, 37, 39, 41, 43, 45, 47, 49, 51, 53, 55, 57, 59, 61, 63, 65, 67, 69, 71, 73, 75, 77, 79, 81, 83, 85, 87 and/or 89 and/or
91, 93, 95, 97, 99, 101, 103, 105, 107, 109 and/or 111 and/or 114, 118, 120, 122, 124, 126, 128, 134, 136, 138, 140, 142, 144, 148, 150, 152, 154, 156, 158, 160, 164, 166, 168, 170, 171, 172, 173, 175, 180, 182, 184, 186, 188, 190, 192, 194, 196, 198, 200, 202, 204, 206, 208, 214, 216, 218, 224, 226, 228, 230, 232, 234, 236, 238, 240, 244, 246, 248, 250, 252, 254, 256, 258, 260, 262, 264, 266, 268, 270, 272, 275, 277 and/or 282 and/or
116, 130, 132, 146, 162, 177, 210, 212, 220, 222, 242, and/or 279
c) nucleic acid molecule comprising a nucleic acid sequence, which, as a result of the degeneracy of the genetic code, can be derived from a polypeptide sequence depicted in SEQ ID NO
2, 4, 6, 8, 10, 12, 14, 16, 18, 20, 22, 24, 26, 28, 30, 32, 34, 36, 38, 40, 42, 44, 46, 48, 50, 52, 54, 56, 58, 60, 62, 64, 66, 68, 70, 72, 74, 76, 78, 80, 82, 84, 86, 88 and/or 90 and/or
92, 94, 96, 98, 100, 102, 104, 106, 108, 110 and/or 112 and/or 115, 119, 121, 123, 125, 127, 129, 135, 137, 139, 141, 143, 145, 149, 151, 153, 155, 157, 159, 161, 165, 167, 169, 174, 176, 179, 181, 183, 185, 187, 189, 191, 193, 195, 197, 199, 201, 203, 205, 207, 209, 215, 217, 219, 225, 227, 229, 231, 233, 235, 237, 239, 241, 245, 247, 249, 251, 253, 255, 257, 259, 261, 263, 265, 267, 269, 271, 273, 274, 276, 278, 281 and/or 283 and/or
117, 131, 133, 147, 163, 178, 211, 213, 221, 223, 243 and/or 280
d) nucleic acid molecule encoding a polypeptide having at least 50% identity with the amino acid sequence of the polypeptide encoded by the nucleic acid molecule of (a) to (c) and having the biological activity represented by protein of SEQ ID NO
2, 4, 6, 8, 10, 12, 14, 16, 18, 20, 22, 24, 26, 28, 30, 32, 34, 36, 38, 40, 42, 44, 46, 48, 50, 52, 54, 56, 58, 60, 62, 64, 66, 68, 70, 72, 74, 76, 78, 80, 82, 84, 86, 88 and/or 90 and/or
92, 94, 96, 98, 100, 102, 104, 106, 108, 110 and/or 112 and/or 115, 119, 121, 123, 125, 127, 129, 135, 137, 139, 141, 143, 145, 149, 151, 153, 155, 157, 159, 161, 165, 167, 169, 174, 176, 179, 181, 183, 185, 187, 189, 191, 193, 195, 197, 199, 201, 203, 205, 207, 209, 215, 217, 219, 225, 227, 229, 231, 233, 235, 237, 239, 241, 245, 247, 249, 251, 253, 255, 257, 259, 261, 263, 265, 267, 269, 271, 273, 274, 276, 278, 281 and/or 283 and/or
117, 131, 133, 147, 163, 178, 211, 213, 221, 223, 243 and/or 280
e) nucleic acid molecule encoding a polypeptide which is isolated with the aid of monoclonal antibodies against a polypeptide encoded by one of the nucleic acid molecules of (a) to (d) and having the biological activity represented by the protein of SEQ ID NO
2, 4, 6, 8, 10, 12, 14, 16, 18, 20, 22, 24, 26, 28, 30, 32, 34, 36, 38, 40, 42, 44, 46, 48, 50, 52, 54, 56, 58, 60, 62, 64, 66, 68, 70, 72, 74, 76, 78, 80, 82, 84, 86, 88 and/or 90 and/or
92, 94, 96, 98, 100, 102, 104, 106, 108, 110 and/or 112 and/or 115, 119, 121, 123, 125, 127, 129, 135, 137, 139, 141, 143, 145, 149, 151, 153, 155, 157, 159, 161, 165, 167, 169, 174, 176, 179, 181, 183, 185, 187, 189, 191, 193, 195, 197, 199, 201, 203, 205, 207, 209, 215, 217, 219, 225, 227, 229, 231, 233, 235, 237, 239, 241, 245, 247, 249, 251, 253, 255, 257, 259, 261, 263, 265, 267, 269, 271, 273, 274, 276, 278, 281 and/or 283 and/or
117, 131, 133, 147, 163, 178, 211, 213, 221, 223, 243 and/or 280
f) nucleic acid molecule which is obtainable by screening a suitable nucleic acid library under stringent hybridization conditions with a probe comprising one of the sequences of the nucleic acid molecule of (a) or (b) or with a fragment thereof having at least 15 nucleotides of the nucleic acid molecule characterized in (a) to (c) and encoding a polypeptide having the biological activity represented by a protein whose reduction or deletion results in increased tolerance and/or resistance to an environmental stress
or which comprises a sequence which is complementary thereto.

3. The transformed plant cell of claim 2, wherein the nucleic acid is at least about 50% homologous to said sequences of SEQ ID NO 1, 3, 5, 7, 9, 11, 13, 15, 17, 19, 21, 23, 25, 27, 29, 31, 33, 35, 37, 39, 41, 43, 45, 47, 49, 51, 53, 55, 57, 59, 61, 63, 65, 67, 69, 71, 73, 75, 77, 79, 81, 83, 85, 87 and/or 89 and/or
91, 93, 95, 97, 99, 101, 103, 105, 107, 109 and/or 111 and/or 114, 118, 120, 122, 124, 126, 128, 134, 136, 138, 140, 142, 144, 148, 150, 152, 154, 156, 158, 160, 164, 166, 168, 170, 171, 172, 173, 175, 180, 182, 184, 186, 188, 190, 192, 194, 196, 198, 200, 202, 204, 206, 208, 214, 216, 218, 224, 226, 228, 230, 232, 234, 236, 238, 240, 244, 246, 248, 250, 252, 254, 256, 258, 260, 262, 264, 266, 268, 270, 272, 275, 277 and/or 282 and/or 116, 130, 132, 146, 162, 177, 210, 212, 220, 222, 242, and/or 279.

4. The transformed plant cell of claim 1 derived from a monocotyledonous plant.

5. The transformed plant cell of claim 1 derived from a dicotyledonous plant.

6. The transformed plant cell of claim 1, wherein the plant is selected from the group comprised of maize, wheat, rye, oat, triticale, rice, barley, soybean, peanut, cotton, rapeseed, canola, manihot, pepper, sunflower, flax, borage, safflower, linseed, primrose, rapeseed, turnip rape, tagetes, solanaceous plants, potato, tobacco, eggplant, tomato, Vicia species, pea, alfalfa, coffee, cacao, tea, Salix species, oil palm, coconut, perennial grass, forage crops and Arabidopsis thaliana.

7. The transformed plant cell of claim 1, derived from a gymnosperm plant.

8. The transformed plant cell of claim 1, wherein the plant is selected from the group of spruce, pine and fir.

9. A transformed plant generated from a plant cell according to claim 1 and which is a monocot or dicot plant.

10. A transformed plant generated from a plant cell according to claim 1 and which is a gymnosperm plant.

11. A seed produced by the transformed plant of claim 9, wherein the seed is at least genetically heterozygous for a gene that when inactivated or down-regulated confers increased tolerance to environmental stress as compared to a wild type plant.

12. A method of producing a transformed plant with altered metabolic activity compared to a corresponding non-transformed wild type plant cell by inactivation or down-regulation of a gene in the transformed plant resulting in increased tolerance and/or resistance to environmental stress as compared to a corresponding non-transformed wild type plant, comprising
(a) transforming a plant cell by inactivation or down-regulation of one or more genes, and
(b) generating from the plant cell a transformed plant with an increased tolerance and/or resistance to environmental stress as compared to a corresponding wild type plant.

13. A method of inducing increased tolerance and/or resistance to environmental stress as compared to a corresponding non-transformed wild type plant in a plant cell of the claim 1 by altering metabolic activity compared to a corresponding non-transformed wild type plant cell by inactivation or down-regulation of one or more genes encoded by one or more nucleic acids selected from a group consisting of sequences of SEQ ID NO
1, 3, 5, 7, 9, 11, 13, 15, 17, 19, 21, 23, 25, 27, 29, 31, 33, 35, 37, 39, 41, 43, 45, 47, 49, 51, 53, 55, 57, 59, 61, 63, 65, 67, 69, 71, 73, 75, 77, 79, 81, 83, 85, 87 and/or 89 and/or
91, 93, 95, 97, 99, 101, 103, 105, 107, 109 and/or 111 and/or
114, 118, 120, 122, 124, 126, 128, 134, 136, 138, 140, 142, 144, 148, 150, 152, 154, 156, 158, 160, 164, 166, 168, 170, 171, 172, 173, 175, 180, 182, 184, 186, 188, 190, 192, 194, 196, 198, 200, 202, 204, 206, 208, 214, 216, 218, 224, 226, 228, 230, 232, 234, 236, 238, 240, 244, 246, 248, 250, 252, 254, 256, 258, 260, 262, 264, 266, 268, 270, 272, 275, 277 and/or 282 and/or 116, 130, 132, 146, 162, 177, 210, 212, 220, 222, 242, and/or 279
and/or homologs thereof.

14. The method of claim 13, wherein the gene encoding nucleic acid is at least about 50% homologous to sequences of SEQ ID NO
1, 3, 5, 7, 9, 11, 13, 15, 17, 19, 21, 23, 25, 27, 29, 31, 33, 35, 37, 39, 41, 43, 45, 47, 49, 51, 53, 55, 57, 59, 61, 63, 65, 67, 69, 71, 73, 75, 77, 79, 81, 83, 85, 87 and/or 89 and/or
91, 93, 95, 97, 99, 101, 103, 105, 107, 109 and/or 111 and/or 114, 118, 120, 122, 124, 126, 128, 134, 136, 138, 140, 142, 144, 148, 150, 152, 154, 156, 158, 160, 164, 166, 168, 170, 171, 172, 173, 175, 180, 182, 184, 186, 188, 190, 192, 194, 196, 198, 200, 202, 204, 206, 208, 214, 216, 218, 224, 226, 228, 230, 232, 234, 236, 238, 240, 244, 246, 248, 250, 252, 254, 256, 258, 260, 262, 264, 266, 268, 270, 272, 275, 277 and/or 282 and/or 116, 130, 132, 146, 162, 177, 210, 212, 220, 222, 242, and/or 279.

15. The method of the claim 12, wherein the inactivation or down-regulation of said gene is achieved by double-stranded RNA interference (dsRNAi), introduction of an antisense nucleic acid, a ribozyme, an antisense nucleic acid combined with a ribozyme, a nucleic acid encoding a co-suppressor, a nucleic acid encoding a dominant negative protein, DNA- or RNA- or protein-binding factors targeting said gene or -RNA or -proteins, RNA degradation inducing viral nucleic acids and expression systems, systems for inducing a homolog recombination of said genes, mutations in said genes or a combination of the above.

16. A plant expression cassette comprising a nucleic acid construct, which when expressed allows inactivation or down-regulation of one or more genes encoded by one or more nucleic acids selected from the group consisting of sequences of SEQ ID NO
1, 3, 5, 7, 9, 11, 13, 15, 17, 19, 21, 23, 25, 27, 29, 31, 33, 35, 37, 39, 41, 43, 45, 47, 49, 51, 53, 55, 57, 59, 61, 63, 65, 67, 69, 71, 73, 75, 77, 79, 81, 83, 85, 87 and/or 89 and/or
91, 93, 95, 97, 99, 101, 103, 105, 107, 109 and/or 111 and/or 114, 118, 120, 122, 124, 126, 128, 134, 136, 138, 140, 142, 144, 148, 150, 152, 154, 156, 158, 160, 164, 166, 168, 170, 11, 172, 173, 175, 180, 182, 184, 186, 188, 190, 192, 194, 196, 198, 200, 202, 204, 206, 208, 214, 216, 218, 224, 226, 228, 230, 232, 234, 236, 238, 240, 244, 246, 248, 250, 252, 254, 256, 258, 260, 262, 264, 266, 268, 270, 272, 275, 277 and/or 282 and/or 116; 130, 132, 146, 162, 177, 210, 212, 220, 222, 242, and/or 279 and/or homologs thereof and/or parts thereof by a method of claim 15.

17. A transformed plant cell with an inactivated or down-regulated gene encoded by a nucleic acid sequence selected from the group consisting of sequences of SEQ ID NO
1, 3, 5, 7, 9, 11, 13, 15, 17, 19, 21, 23, 25, 27, 29, 31, 33, 35, 37, 39, 41, 43, 45, 47, 49, 51, 53, 55, 57, 59, 61, 63, 65, 67, 69, 71, 73, 75, 77, 79, 81, 83, 85, 87 and/or 89 and/or
91, 93, 95, 97, 99, 101, 103, 105, 107, 109 and/or 111 and/or 114, 118, 120, 122, 124, 126, 128, 134, 136, 138, 140, 142, 144, 148, 150, 152, 154, 156, 158, 160, 164, 166, 168, 170, 171, 172, 173, 175, 180, 182, 184, 186, 188, 190, 192, 194, 196, 198, 200, 202, 204, 206, 208, 214, 216, 218, 224, 226, 228, 230, 232, 234, 236, 238, 240, 244, 246, 248, 250, 252, 254, 256, 258, 260, 262, 264, 266, 268, 270, 272, 275, 277 and/or 282 and/or 116, 130, 132, 146, 162, 177, 210, 212, 220, 222, 242, and/or 279 and/or homologs thereof.

18. An isolated nucleic acid molecule which comprises a nucleic acid molecule selected from the group consisting of:
a) nucleic acid molecule which encodes a polypeptide comprising the polypeptide shown in 2, 4, 6, 8, 10, 12, 14, 16, 18, 20, 22, 24, 26, 28, 30, 32, 34, 36, 38, 40, 42, 44, 46, 48, 50, 52, 54, 56, 58, 60, 62, 64, 66, 68, 70, 72, 74, 76, 78, 80, 82, 84, 86, 88 and/or 90 and/or
92, 94, 96, 98, 100, 102, 104, 106, 108, 110 and/or 112 and/or
115, 119, 121, 123, 125, 127, 129, 135, 137, 139, 141, 143, 145, 149, 151, 153, 155, 157, 159, 161, 165, 167, 169, 174, 176, 179, 181, 183, 185, 187, 189, 191, 193, 195, 197, 199, 201, 203, 205, 207, 209, 215, 217, 219, 225, 227, 229, 231, 233, 235, 237, 239, 241, 245, 247, 249, 251, 253, 255, 257, 259, 261, 263, 265, 267, 269, 271, 273, 274, 276, 278, 281 and/or 283 and/or
117, 131, 133, 147, 163, 178, 211, 213, 221, 223, 243 and/or 280;
b) nucleic acid molecule which comprising the polynucleotide shown in SEQ ID NO 1, 3, 5, 7, 9, 11, 13, 15, 17, 19, 21, 23, 25, 27, 29, 31, 33, 35, 37, 39, 41, 43, 45, 47, 49, 51, 53, 55, 57, 59, 61, 63, 65, 67, 69, 71, 73, 75, 77, 79, 81, 83, 85, 87 and/or 89 and/or
91, 93, 95, 97, 99, 101, 103, 105, 107, 109 and/or 111 and/or 114, 118, 120, 122, 124, 126, 128, 134, 136, 138, 140, 142, 144, 148, 150, 152, 154, 156, 158, 160, 164, 166, 168, 170, 171, 172, 173, 175, 180, 182, 184, 186, 188, 190, 192, 194, 196, 198, 200, 202, 204, 206, 208, 214, 216, 218, 224, 226, 228, 230, 232, 234, 236, 238, 240, 244, 246, 248, 250, 252, 254, 256, 258, 260, 262, 264, 266, 268, 270, 272, 275, 277 and/or 282 and/or
116, 130, 132, 146, 162, 177, 210, 212, 220, 222, 242, and/or 279;
c) nucleic acid molecule comprising a nucleic acid sequence, which, as a result of the degeneracy of the genetic code, can be derived from a polypeptide sequence depicted (b) and having the biological activity represented by protein of SEQ ID NO
2, 4, 6, 8, 10, 12, 14, 16, 18, 20, 22, 24, 26, 28, 30, 32, 34, 36, 38, 40, 42, 44, 46, 48, 50, 52, 54, 56, 58, 60, 62, 64, 66, 68, 70, 72, 74, 76, 78, 80, 82, 84, 86, 88 and/or 90 and/or
92, 94, 96, 98, 100, 102, 104, 106, 108, 110 and/or 112 and/or 115, 119, 121, 123, 125, 127, 129, 135, 137, 139, 141, 143, 145, 149, 151, 153, 155, 157, 159, 161, 165, 167, 169, 174, 176, 179, 181, 183, 185, 187, 189, 191, 193, 195, 197, 199, 201, 203, 205, 207, 209, 215, 217, 219, 225, 227, 229, 231, 233, 235, 237, 239, 241, 245, 247, 249, 251, 253, 255, 257, 259, 261, 263, 265, 267, 269, 271, 273, 274, 276, 278, 281 and/or 283 and/or
117, 131, 133, 147, 163, 178, 211, 213, 221, 223, 243 and/or 280;
d) nucleic acid molecule encoding a polypeptide having at least 50% identity with the amino acid sequence of the polypeptide encoded by the nucleic acid molecule of (a) or (c) and having a biological activity represented by protein of SEQ ID NO 2, 4, 6, 8, 10, 12, 14, 16, 18, 20, 22, 24, 26, 28, 30, 32, 34, 36, 38, 40, 42, 44, 46, 48, 50, 52, 54, 56, 58, 60, 62, 64, 66, 68, 70, 72, 74, 76, 78, 80, 82, 84, 86, 88 and/or 90 and/or 92, 94, 96, 98, 100, 102, 104, 106, 108, 110 and/or 112 and/or 115, 119, 121, 123, 125, 127, 129, 135, 137, 139, 141, 143, 145, 149, 151, 153, 155, 157, 159, 161, 165, 167, 169, 174, 176, 179, 181, 183, 185, 187, 189, 191, 193, 195, 197, 199, 201, 203, 205, 207, 209, 215, 217, 219, 225, 227, 229, 231, 233, 235, 237, 239, 241, 245, 247, 249, 251, 253, 255, 257, 259, 261, 263, 265, 267, 269, 271, 273, 274, 276, 278, 281 and/or 283 and/or 117, 131, 133, 147, 163, 178, 211, 213, 221, 223, 243 and/or 280;
e) nucleic acid molecule encoding a polypeptide, which is isolated with the aid of monoclonal antibodies against a polypeptide encoded by one of the nucleic acid molecules of (a) to (c) and having a biological activity represented by the peptides shown in (a);
f) nucleic acid molecule which is obtainable by screening a suitable library under stringent hybridization conditions wits a probe comprising one of the sequences of the nucleic acid molecule of (a) to (c) or with a fragment of at least 15 nucleotide characterized in (a) to (c) and encoding a polypeptide having the biological activity represented the peptides shown in (a);
g) a nucleic acid molecule having at least 70% sequence identity to polynucleotide selected from the groups consisting of the polynucleotides shown in SEQ ID NO
1, 3, 5, 7, 9, 11, 13, 15, 17, 19, 21, 23, 25, 27, 29, 31, 33, 35, 37, 39, 41, 43, 45, 47, 49, 51, 53, 55, 57, 59, 61, 63, 65, 67, 69, 71, 73, 75, 77, 79, 81, 83, 85, 87 and/or 89 and/or
91, 93, 95, 97, 99, 101, 103, 105, 107, 109 and/or 111 and/or 114, 118, 120, 122, 124, 126, 128, 134, 136, 138, 140, 142, 144, 148, 150, 152, 154, 156, 158, 160, 164, 166, 168, 170, 171, 172, 173, 175, 180, 182, 184, 186, 188, 190, 192, 194, 196, 198, 200, 202, 204, 206, 208, 214, 216, 218, 224, 226, 228, 230, 232, 234, 236, 238, 240, 244, 246, 248, 250, 252, 254, 256, 258, 260, 262, 264, 266, 268, 270, 272, 275, 277 and/or 282 and/or
116, 130, 132, 146, 162, 177, 210, 212, 220, 222, 242, and/or 279;
or which comprises a sequence which is complementary thereto; whereby the nucleic acid molecule according to (a) to (g) is at least in one or more nucleotides different from the sequence depicted in SEQ ID NO
1, 3, 5, 7, 9, 11, 13, 15, 17, 19, 21, 23, 25, 27, 29, 31, 33, 35, 37, 39, 41, 43, 45, 47, 49, 51, 53, 55, 57, 59, 61, 63, 65, 67, 69, 71, 73, 75, 77, 79, 81, 83, 85, 87 and/or 89 and/or
91, 93, 95, 97, 99, 101, 103, 105, 107, 109 and/or 111 and/or 114, 118, 120, 122, 1.24, 126, 128, 134, 136, 138, 140, 142, 144, 148, 150, 152, 154, 156, 158, 160, 164, 166, 168, 170, 171, 172, 173, 175, 180, 182, 184, 186, 188, 190, 192, 194, 196, 198, 200, 202, 204, 206, 208, 214, 216, 218, 224, 226, 228, 230, 232, 234, 236, 238, 240, 244, 246, 248, 250, 252, 254, 256, 258, 260, 262, 264, 266, 268, 270, 272, 275, 277 and/or 282 and/or 116, 130, 132, 146, 162, 177, 210, 212, 220, 222, 242, and/or 279
and which encodes a protein which differs at least in one or more amino acids from the protein sequences depicted in SEQ ID NO
2, 4, 6, 8, 10, 12, 14, 16, 18, 20, 22, 24, 26, 28, 30, 32, 34, 36, 38, 40, 42, 44, 46, 48, 50, 52, 54, 56, 58, 60, 62, 64, 66, 68, 70, 72, 74, 76, 78, 80, 82, 84, 86, 88 and/or 90 and/or
92, 94, 96, 98, 100, 102, 104, 106, 108, 110 and/or 112 and/or 115, 119, 121, 1.23, 125, 127, 129, 135, 137, 139, 141, 143, 145, 149, 151, 153, 155, 157, 159, 161, 165, 167, 169, 174, 176, 179, 181, 183, 185, 187, 189, 191, 193, 195, 197, 199, 201, 203, 205, 207, 209, 215, 217, 219, 225, 227, 229, 231, 233, 235, 237, 239, 241, 245, 247, 249, 251, 253, 255, 257, 259, 261, 263, 265, 267, 269, 271, 273, 274, 276, 278, 281 and/or 283 and/or 117, 131, 133, 147, 163, 178, 211, 213, 221, 223, 243 and/or 280.

19. An isolated polypeptide encoded by a nucleic acid molecule as claimed in claim 18.

20. An antibody, which specifically binds to the polypeptide as claimed in claim 19.

21. A transformed plant cell wherein increased tolerance and/or resistance to an environmental stress is conferred by one or more inactivated or down-regulated genes encoded by one or more nucleic acid sequences selected from the group consisting of:
a) nucleic acid molecule encoding the polypeptide shown in SEQ ID NO 2, 4, 6, 8, 10, 12, 14, 16, 18, 20, 22, 24, 26, 28, 30, 32, 34, 36, 38, 40, 42, 44, 46, 48, 50, 52, 54, 56, 58, 60, 62, 64, 66, 68, 70, 72, 74, 76, 78, 80, 82, 84, 86, 88 and/or 90 and/or
92, 94, 96, 98, 100, 102, 104, 106, 108, 110 and/or 112 and/or 115, 119, 121, 123, 125, 127, 129, 135, 137, 139, 141, 143, 145, 149, 151, 153, 155, 157, 159, 161, 165, 167, 169, 174, 176, 179, 181, 183, 185, 187, 189, 191, 193, 195, 197, 199, 201, 203, 205, 207, 209, 215, 217, 219, 225, 227, 229, 231, 233, 235, 237, 239, 241, 245, 247, 249, 251, 253, 255, 257, 259, 261, 263, 265, 267, 269, 271, 273, 274, 276, 278, 281 and/or 283 and/or
117, 131, 133, 147, 163, 178, 211, 213, 221, 223, 243 and/or 280;
b) nucleic acid molecule comprising the nucleic acid molecule shown in SEQ ID NO
1, 3, 5, 7, 9, 11, 13, 15, 17, 19, 21, 23, 25, 27, 29, 31, 33, 35, 37, 39, 41, 43, 45, 47, 49, 51, 53, 55, 57, 59, 61, 63, 65, 67, 69, 71, 73, 75, 77, 79, 81, 83, 85, 87 and/or 89 and/or
91, 93, 95, 97, 99, 101, 103, 105, 107, 109 and/or 111 and/or 114, 118, 120, 122, 124, 126, 128, 134, 136, 138, 140, 142, 144, 148, 150, 152, 154, 156, 158, 160, 164, 166, 168, 170, 171, 172, 173, 175, 180, 182, 184, 186, 188, 190, 192, 194, 196, 198, 200, 202, 204, 206, 208, 214, 216, 218, 224, 226, 228, 230, 232, 234, 236, 238, 240, 244, 246, 248, 250, 252, 254, 256, 258, 260, 262, 264, 266, 268, 270, 272, 275, 277 and/or 282 and/or
116, 130, 132, 146, 162, 177, 210, 212, 220, 222, 242, and/or 279;
c) nucleic acid molecule comprising a nucleic acid sequence, which, as a result of the degeneracy of the genetic code, can be derived from a polypeptide sequence depicted in SEQ ID NO
2, 4, 6, 8, 10, 12, 14, 16, 18, 20, 22, 24, 26, 28, 30, 32, 34, 36, 38, 40, 42, 44, 46, 48, 50, 52, 54, 56, 58, 60, 62, 64, 66, 68, 70, 72, 74, 76, 78, 80, 82, 84, 86, 88 and/or 90 and/or
92, 94, 96, 98, 100, 102, 104, 106, 108, 110 and/or 112 and/or 115, 119, 121, 123, 125, 127, 129, 135, 137, 139, 141, 143, 145, 149, 151, 153, 155, 157, 159, 161, 165, 167, 169, 174, 176, 179, 181, 183, 185, 187, 189, 191, 193, 195, 197, 199, 201, 203, 205, 207, 209, 215, 217, 219, 225, 227, 229, 231, 233, 235, 237, 239, 241, 245, 247, 249, 251, 253, 255, 257, 259, 261, 263, 265, 267, 269, 271, 273, 274, 276, 278, 281 and/or 283 and/or
117, 131, 133, 147, 163, 178, 211, 213, 221, 223, 243 and/or 280;
d) nucleic acid molecule encoding a polypeptide having at least 50% identity with the amino acid sequence of the polypeptide encoded by the nucleic acid molecule of (a) to (c) and having the biological activity represented by protein of SEQ ID NO
2, 4, 6, 8, 10, 12, 14, 16, 18, 20, 22, 24, 26, 28, 30, 32, 34, 36, 38, 40, 42, 44, 46, 48, 50, 52, 54, 56, 58, 60, 62, 64, 66, 68, 70, 72, 74, 76, 78, 80, 82, 84, 86, 88 and/or 90 and/or
92, 94, 96, 98, 100, 102, 104, 106, 108, 110 and/or 112 and/or 115, 119, 121, 123, 125, 127, 129, 135, 137, 139, 141, 143, 145, 149, 151, 153, 155, 157, 159, 161, 165, 167, 169, 174, 176, 179, 181, 183, 185, 187, 189, 191, 193, 195, 197, 199, 201, 203, 205, 207, 209, 215, 217, 219, 225, 227, 229, 231, 233, 235, 237, 239, 241, 245, 247, 249, 251, 253, 255, 257, 259, 261, 263, 265, 267, 269, 271, 273, 274, 276, 278, 281 and/or 283 and/or
117, 131, 133, 147, 163, 178, 211, 213, 221, 223, 243 and/or 280;
e) nucleic acid molecule encoding a polypeptide which is isolated with the aid of monoclonal antibodies against a polypeptide encoded by one of the nucleic acid molecules of (a) to (d) and having the biological activity represented by the protein of SEQ ID NO
2, 4, 6, 8, 10, 12, 14, 16, 18, 20, 22, 24, 26, 28, 30, 32, 34, 36, 38, 40, 42, 44, 46, 48, 50, 52, 54, 56, 58, 60, 62, 64, 66, 68, 70, 72, 74, 76, 78, 80, 82, 84, 86, 88 and/or 90 and/or
92, 94, 96, 98, 100, 102, 104, 106, 108, 110 and/or 112 and/or 115, 119, 121, 123, 125, 127, 129, 135, 137, 139, 141, 143, 145, 149, 151, 153, 155, 157, 159, 161, 165, 167, 169, 174, 176, 179, 181, 183, 185, 187, 189, 191, 193, 195, 197, 199, 201, 203, 205, 207, 209, 215, 217, 219, 225, 227, 229, 231, 233, 235, 237, 239, 241, 245, 247, 249, 251, 253, 255, 257, 259, 261, 263, 265, 267, 269, 271, 273, 274, 276, 278, 281 and/or 283 and/or
117, 131, 133, 147, 163, 178, 211, 213, 221, 223, 243 and/or 280;
f) nucleic acid molecule which is obtainable by screening a suitable nucleic acid library under stringent hybridization conditions with a probe comprising one of the sequences of the nucleic acid molecule of (a) or (b) or with a fragment thereof having at least 15 nucleotide of the nucleic acid molecule characterized in (a) to (c) and encoding a polypeptide having the biological activity represented by protein whose reduction or deletion results in increased tolerance and/or resistance to an environmental stress; and
g) a nucleic acid molecule having at least 70% sequence identity to polynucleotide selected from the groups consisting of the polynucleotides shown in SEQ ID NO
2, 4, 6, 8, 10, 12, 14, 16, 18, 20, 22, 24, 26, 28, 30, 32, 34, 36, 38, 40, 42, 44, 46, 48, 50, 52, 54, 56, 58, 60, 62, 64, 66, 68, 70, 72, 74, 76, 78, 80, 82, 84, 86, 88 and/or 90 and/or
92, 94, 96, 98, 100, 102, 104, 106, 108, 110 and/or 112 and/or 115, 119, 121, 123, 125, 127, 129, 135, 137, 139, 141, 143, 145, 149, 151, 153, 155, 157, 159, 161, 165, 167, 169, 174, 176, 179, 181, 183, 185, 187, 189, 191, 193, 195, 197, 199, 201, 203, 205, 207, 209, 215, 217, 219, 225, 227, 229, 231, 233, 235, 237, 239, 241, 245, 247, 249, 251, 253, 255, 257, 259, 261, 263, 265, 267, 269, 271, 273, 274, 276, 278, 281 and/or 283 and/or
117, 131, 133, 147, 163, 178, 211, 213, 221, 223, 243 and/or 280;
or which comprises a sequence which is complementary thereto.

22. A plant comprising a cell of claim 21.

23. The method of claim 12 wherein the inactivated or down-regulated gene is encoded by one or more nucleic acids selected from a group consisting of sequences of SEQ ID NO
1, 3, 5, 7, 9, 11, 13, 15, 17, 19, 21, 23, 25, 27, 29, 31, 33, 35, 37, 39, 41, 43, 45, 47, 49, 51, 53, 55, 57, 59, 61, 63, 65, 67, 69, 71, 73, 75, 77, 79, 81, 83, 85, 87 and/or 89 and/or
91, 93, 95, 97, 99, 101, 103, 105, 107, 109 and/or 111 and/or 114, 118, 120, 122, 124, 126, 128, 134, 136, 138, 140, 142, 144, 148, 150, 152, 154, 156, 158, 160, 164, 166, 168, 170, 171, 172, 173, 175, 180, 182, 184, 186, 188, 190, 192, 194, 196, 198, 200, 202, 204, 206, 208, 214, 216, 218, 224, 226, 228, 230, 232, 234, 236, 238, 240, 244, 246, 248, 250, 252, 254, 256, 258, 260, 262, 264, 266, 268, 270, 272, 275, 277 and/or 282 and/or
116, 130, 132, 146, 162, 177, 210, 212, 220, 222, 242, and/or 279
and/or homologs thereof.

The application's sequence listing, which the Patent Office published only in electronic form, follows.

SEQUENCE LISTING (294 sequences)

SEQ ID NO: 1 - DNA, 1167 bp, Arabidopsis thaliana
  CDS (1)..(1167)
atgctttcttcaatcaaaccatcttcgtcttccttctccaccgctatctccggcagcgtaaggcggtcaattcctacaaagctcaagttttctcctttactcatcatcaaaaactgccataaccaaagctttaacgctaatgttgtctcccatcaaaagcctctacacatttcatctgcttcgaatttcaagcgtgaggtcaaagtcgaagcttacgaggccgatcgttcccgtccactggacatcaacatcgagcttcccgatgaacaatccgcgcagaaactgaaaatcggaatctacttcgcaacttggtgggcacttaacgttgtcttcaacatctacaacaagaaagtcctcaatgcttttccttacccgtggcttacttcgacgttgtctctcgcttgtggttctttgatgatgcttgtctcttgggctactagaatcgcagatgctcctaaaactgatctcgagttctggaaaactctgttcccggtcgctgtagcacacacgataggacacgttgcagcaacagtgagtatgtcaaaagtagcagtttccttcacacacatcattaaaagtggtgaaccagctttcagtgtcttagtctcaagattcttcatgggagagactttccctcttcctgtctatctctctctcttaccaatcatcggaggctgcgctctcgcggccatcaccgagcttaacttcaacatcactgggtttatgggggcaatgatatcgaatttggcatttgtgttccggaatatcttttcgaagaaagggatgaaagggaagtcagtgagcggaatgaactactacgcttgcttatcgatgatgtctcttgtgatcctcactccattttctattgccgtggaaggtcctcaaatgtgggctgctggttggcaaaatgcggtttctcaagtcggaccaaactttgtctggtgggtagtggcacaaagtgtgttttaccatttgtacaatcaggtctcatacatgtcattagaccagatttcgccgttaactttcagtatcggtaatacgatgaagcggatttccgttattgttgcatcgatcatcattttccataccccgattcaaccggttaatgccctcggtgctgccattgcgatttttggaactttcctctactcacaggcgaagcagtga

SEQ ID NO: 2 - protein, 388 aa, Arabidopsis thaliana
MLSSIKPSSSSFSTAISGSVRRSIPTKLKFSPLLIIKNCHNQSFNANVVSHQKPLHISSASNFKREVKVEAYEADRSRPLDINIELPDEQSAQKLKIGIYFATWWALNVVFNIYNKKVLNAFPYPWLTSTLSLACGSLMMLVSWATRIADAPKTDLEFWKTLFPVAVAHTIGHVAATVSMSKVAVSFTHIIKSGEPAFSVLVSRFFMGETFPLPVYLSLLPIIGGCALAAITELNFNITGFMGAMISNLAFVFRNIFSKKGMKGKSVSGMNYYACLSMMSLVILTPFSIAVEGPQMWAAGWQNAVSQVGPNFVWWVVAQSVFYHLYNQVSYMSLDQISPLTFSIGNTMKRISVIVASIIIFHTPIQPVNALGAAIAIFGTFLYSQAKQ

SEQ ID NO: 3 - DNA, 1563 bp, Arabidopsis thaliana
  CDS (1)..(1563)
atgaaaaatttaaccagtttcgtaattgttatcttactacaaagcttattgtttcatgtatatggtcgtcatcaaagttcttcgaagaacattttagtagattcatctccatttccttctgatttcctctttggtacagcttcttccgcttaccagtatgaaggtgcgttcttgactgatggaaaaagtttgaacaattgggatgtctttacgcataaaaatcctgggaaaatacttgacaagaacaatgcagatagagctgtggaccaatataatcgatttttggaggacatccaattaatgtcttttcttggagtgaacagttataggttttcaatttcttggtgtagaatcttacctagaggaagatttggagagattaattatttggggataaagtattacaacatatttatcgatgctctcattagtagagggattaaaccatttgtgacgttgaaccatgtcgactatcctcaagaactcgaggaccggtttcaaagttggttaaaccccgagatgcagaaggaatttggttatttagccgatatatgtttcaagcattttggaaaccgagttaaatactggaccacgcttaacgaaccaaatcaacaattaatcttaggctatctaacaggtaaatttccaccctctcgttgctcctcgccatacgggaactgtagccaggggaattcagaaaccgaacctttcatagccgcacataacatgatccttgcacacgcaaaagcggttaacatatacaagaccaaatatcagaaagaacaaaagggaagcattggcattgtggtacaaacatcatggtttgaacccattagtgattccaatgcggataaagaagctgctgagagagctcaatcattttactctaattggattctagatcccgttatatatgggaaatatccaaaagaaatggtagatattcttggaccagccttgccacaattttcgagcaatgaagtgaagaacttagagaagtcgagggcagatttcgttggtattaatcactatacaagttacttcattcaagattgtttgacctctgcttgtaatactggacatggagcttttaaggccgaaggatatgctctcaagttagaccggaaaggcaatgttactataggagaacttaccgatgtaaattggcagcatattgatcccacaggattccacaagatgctgaattatttaaaagataggtacccaaacatgccaatgttcataactgaaaacggttttggagacttgcaaaaacctgaaacaacggataaagaacttctaaatgatacaaaaaggatccaatacatgagtggatacttagaagctttacaagcagcaatgagggatggagcaaatgtgaagggttattttgtgtggtcactattagacaattttgagtggttgttcggatacaaggttcggtttggtctattccatgtggatctaacaactcttaaaaggtcaccgaaacaatcagcttcatggtacaaaaattatatcgaagaacacgtgaatcgaagagatatcgtagataattattaa

SEQ ID NO: 4 - protein, 520 aa, Arabidopsis thaliana
MKNLTSFVIVILLQSLLFHVYGRHQSSSKNILVDSSPFPSDFLFGTASSAYQYEGAFLTDGKSLNNWDVFTHKNPGKILDKNNADRAVDQYNRFLEDIQLMSFLGVNSYRFSISWCRILPRGRFGEINYLGIKYYNIFIDALISRGIKPFVTLNHVDYPQELEDRFQSWLNPEMQKEFGYLADICFKHFGNRVKYWTTLNEPNQQLILGYLTGKFPPSRCSSPYGNCSQGNSETEPFIAAHNMILAHAKAVNIYKTKYQKEQKGSIGIVVQTSWFEPISDSNADKEAAERAQSFYSNWILDPVIYGKYPKEMVDILGPALPQFSSNEVKNLEKSRADFVGINHYTSYFIQDCLTSACNTGHGAFKAEGYALKLDRKGNVTIGELTDVNWQHIDPTGFHKMLNYLKDRYPNMPMFITENGFGDLQKPETTDKELLNDTKRIQYMSGYLEALQAAMRDGANVKGYFVWSLLDNFEWLFGYKVRFGLFHVDLTTLKRSPKQSASWYKNYIEEHVNRRDIVDNY

SEQ ID NO: 5 - DNA, 753 bp, Arabidopsis thaliana
  CDS (1)..(753)
atggcgacagagagagagacgattgagaggagagatcaaaggattctcgtttccattgacgacgatggtggaggaagaaagcaatcatcaaagacaaagaagcttctcagattacgaatgaagaagacggagaatttcagacgacgacgacgcaaggtgggctcacggtggtgggcttttttttatgggccccttctttgctaccaaatccaaccagaaaaagttttatgcttgaagctctcgtcggtcgctagagctgaatttgatttgagggagatggaaagagacaaggttaatgattttgtggttaatggcaagattaacaagttaattaagttattatcaaatagaggatcccatatagtaactttacgagagcataacgtagacgaaccaacactaaccacaaaacttaggggtgcatacaaaaataaaattgaaaaaacagagcatagatcagtgatccggactctgttttggaagatctctaaaaagcttaggatcatcatcggcatcgcgcagatagaaaccatcatcgaaattctgcgaatagctcacagcatcgtagtgaaacgtcttgtcttgttgttgtggttactgattcgagcgtactctgtttcttctgtatggatgagacaagataacggcgaactcaagcatcgaccggtggagtacgattgtctacggttgtcggcgagaactctatccatttcttgcaaaaataaaagagagattgttttattgattgagtga

SEQ ID NO: 6 - protein, 250 aa, Arabidopsis thaliana
MATERETIERRDQRILVSIDDDGGGRKQSSKTKKLLRLRMKKTENFRRRRRKVGSRWWAFFYGPLLCYQIQPEKVLCLKLSSVARAEFDLREMERDKVNDFVVNGKINKLIKLLSNRGSHIVTLREHNVDEPTLTTKLRGAYKNKIEKTEHRSVIRTLFWKISKKLRIIIGIAQIETIIEILRIAHSIVVKRLVLLLWLLIRAYSVSSVWMRQDNGELKHRPVEYDCLRLSARTLSISCKNKREIVLLIE

SEQ ID NO: 7 - DNA, 2028 bp, Arabidopsis thaliana
  CDS (1)..(2028)
atgctttatttcattttctgtcaaaatctttcttcttcctcctctatgtctaattcaatcttgttcctttcccttttcctcttcctcccttttgttgttgattcactttacttcaactttacaagttttcgacaaggtgatcccggggacatattttaccacggggatgcaactcccgatgaagatggaacagtgaacttcaacaacgctgaacaaacatctcaggttggttggattacttattcaaagaaggtgcctatatggagtcataaaactggtaaggcttcagatttcagcaccagtttctccttcaaaatcgatgctcgtaatctttcagcagatggtcatggaatctgtttctttcttgctcctatgggagctcaactacctgcatactcagttggtggtttcttgaatttgttcactcggaagaataattactcatcttcgtttccgctagttcatgttgaatttgacacgtttaacaatccaggatgggatcctaatgatgttggatctcatgttgggatcaataacaactctcttgtttcttccaactacacttcttggaatgcaagctctcacagccaagatatttgtcatgcaaagatctcttatgattccgtgaccaagaatttaagtgtgacttgggcttatgagctaacagcaacctctgatcctaaggagagttcaagcctttcttacatcatcgacctcgctaaggttctgccatcagatgttatgttcgggtttatagctgccgctgggacaaacacagaggaacatagacttttatcatgggagctcagttcaagtttggacagcgacaaagccgatagcaggataggactagtaattggcatttcggcttccgggtttgtttttctgacgtttatggtcatcacaaccgtggtggtttggtcacggaagcaaagaaagaagaaagaaagagatatagaaaacatgatatcgataaacaaagaccttgaaagggaagcaggaccaagaaagttttcttataaggatcttgtgtcagcaaccaacagattctcaagccatagaaagctaggtgaaggaggatttggagcagtttatgaaggaaacttgaaagaaatcaatacaatggttgcggtgaagaaactatccggtgattcaaggcagggaaagaacgagtttttaaacgaagttaagatcatcagcaaactgagacatcgaaacctcgtgcagctcatcggttggtgtaatgagaaaaatgagttcttgctgatatatgagttagttccaaatggtagcttgaactctcacctctttgggaaaagacccaatttactttcttgggacataaggtacaagataggtcttggtttagcctctgctctgctttatcttcatgaagaatgggatcaatgtgtactgcacagagacatcaaggcaagtaatataatgcttgacagtgaattcaatgtaaagttaggtgatttcgggttggctcggctaatgaaccatgaacttggttcccatacaacggggttggctggaacttttgggtacatggcacctgaatatgtaatgaaaggaagtgcgagtaaagaatctgatatatatagctttggaattgttttactagagattgtcacagggagaaaatcgctggaacgtacacaagaagataacagtgatacagagagtgatgatgagaagagtctagtggagaaagtttgggagctttatggaaaacaagaactgatcacttcatgtgttgatgacaaattgggtgaggatttcgacaagaaagaagctgaatgtcttctggttttagggttatggtgtgctcatcctgataaaaactcgagaccttcgataaaacaagggatccaagtcatgaattttgagtcaccattgcctgatcttccattgaagaggcctgttgctatgtattacatctcgactactacttcttcttcttctccctcagttaactcaaatggagtttctgtaacgttctcaggcatcgagtatggtcgttaa

SEQ ID NO: 8 - protein, 675 aa, Arabidopsis thaliana
MLYFIFCQNLSSSSSMSNSILFLSLFLFLPFVVDSLYFNFTSFRQGDPGDIFYHGDATPDEDGTVNFNNAEQTSQVGWITYSKKVPIWSHKTGKASDFSTSFSFKIDARNLSADGHGICFFLAPMGAQLPAYSVGGFLNLFTRKNNYSSSFPLVHVEFDTFNNPGWDPNDVGSHVGINNNSLVSSNYTSWNASSHSQDICHAKISYDSVTKNLSVTWAYELTATSDPKESSSLSYIIDLAKVLPSDVMFGFIAAAGTNTEEHRLLSWELSSSLDSDKADSRIGLVIGISASGFVFLTFMVITTVVVWSRKQRKKKERDIENMISINKDLEREAGPRKFSYKDLVSATNRFSSHRKLGEGGFGAVYEGNLKEINTMVAVKKLSGDSRQGKNEFLNEVKIISKLRHRNLVQLIGWCNEKNEFLLIYELVPNGSLNSHLFGKRPNLLSWDIRYKIGLGLASALLYLHEEWDQCVLHRDIKASNIMLDSEFNVKLGDFGLARLMNHELGSHTTGLAGTFGYMAPEYVMKGSASKESDIYSFGIVLLEIVTGRKSLERTQEDNSDTESDDEKSLVEKVWELYGKQELITSCVDDKLGEDFDKKEAECLLVLGLWCAHPDKNSRPSIKQGIQVMNFESPLPDLPLKRPVAMYYISTTTSSSSPSVNSNGVSVTFSGIEYGR

SEQ ID NO: 9 - DNA, 2694 bp, Arabidopsis thaliana
  CDS (1)..(2694)
atgacgacggcggcgatgacttgtacgagactgacgatatttacggtggccggaatattacttcagattattggcctctccattttcgtattcggtttcttccccgtcaagccgactctctccggcgtcagtggctcggagagctatcgagatccattctgtgattcttctctgatttcgaacgaatcggagcttcatcatccagagaaactgagattgctgtaccaggttattgatgggctacctgcggagttcgttcttgggaaagatggtaaacctccagagaaggttttgaaagagtctatgccttatactcagtcactgttagctaatggagatgctattggttaccatgctaaagcagctcctccaactgttaccatgccgaggttaaaggcaatggtttctggggcaattggtggtttcttggatgttgcttttaattttaacacacaagctctcttagatgataatattcttggtcagtttttcaggattggttggaaaatggtgatgctcggtgatgagacgtggctcaagttatttccagggctatttatgagacatgacggtgttagcagtttctttgtcaaagatacagtacaggtagacagaaatgtttctcgacacttgcccgatgagctaaacagtgatgattggaatctcttgatccttcattaccttggtttagatcacgttggacatactggcggccgtaacagccccttgatgcctgcaaaacttaaagaaatggatgatatagttagaacaatgcatttaagagccatgatggatcgcagccatgatcaaggacagactcttctgataatagtcagtgatcatggcatgactgagaatggaaatcacggagggtcgtcatatgaagaaactgactccttaatgctctttattggcttgaatagcaatatttctgactatgcttcagctaccaataatgtagctttccaggtagatttggcgccaactttagctcttctatttggtgtgccgatcccaaagaacaatgttggagtccttgtcccaggaacactctgttctttaagagattttgagcaactacgggcactagaactgaattcatggcagttactcagacttatgctagcacagatacaaagttcttcgtttccacgcgtctcctgcaattgcttccttgatggaacttgtgagggtcttgatttggatattagtgagtgttctggggataaagagaaacaacttatttgcttgtttaggaatgctgctgccctccatggcatttggaagtccaagaaatcaacagagtcgtctagtaccatggaagatttcagcagagctttagatgcatataacaccttcttgaaaactgcaagtgagtggttagcaagcaaaaccacggagaaacctgttctcttactcggtcttggagtgagtgccatgcttctgtcatgcttcatctgtggtactgtctttctgtccttattcaaagaggtttaccatgagcccaaggatagggtctgcagtttgagtaatttgttgaatttagaagaggtgttcatttttgctcttcttttgatacttgttataagcatgggatctagttcaatggtggaagaagagcattatatatggcatttcatggtatcaacattccatcttctgttactcttcaagacagcgaagtcattcaaaatttccaaggggatgaacattctcagagactttaaattcggttctatcttctcgcttcttatttctggtagactactgagaggttggcatcaagggggcgtgaactggacttaccttcctgatatttctaagtggctagtgcaaggtggcagtggttatgtgaaatggattcagctaatctcaataatcctagttattggtctaggactatatactctctttcgaacaggatcgaatagaaaaggtgttcgcatcctagcatttggtttctcaacttgtgggttcctagtcttgctgcatgtagggagatatcaggatgaactgtcaaccggttttggagccactgtcacagtaaaagttatttattatcttctatctatatcttccattggagcttctttggttttgccatggtctgcgctaaacaaagacaagtcctttctagctgaagtaggtgattgcttgtatttgattggctctgcgtacatactttgctggtgtcttctacagcaacttctccaacaaccaatcaactcgggccccatacttttgctgctcctccaaatcttagcaattttatgtctttcttctagtgattttcaagttaatgaatgggtcgagattactgcactctattacatgggaatggcaggtcactttgctcttggaaacagcaacactttagcaacaatcgatgttgctggtgcttttatcggaatctctagtcattctacaatactctctgggatcttgatgttcatgatcacctatgcatctcccatgctgttccttctatccctcgtcatgtacattggtgcaaatcttagaaaccactcaaactcaacaatatcaactcaccgggaaacgactaaagctcgggttcccttgccttgttccgctctgcatcaactcaatactcttgaccgcatatactgtggtcttactactcatgagaaatcacctctttgtatggagcgtcttctctcccaagtgagtctttga

SEQ ID NO: 10 - protein, 897 aa, Arabidopsis thaliana
MTTAAMTCTRLTIFTVAGILLQIIGLSIFVFGFFPVKPTLSGVSGSESYRDPFCDSSLISNESELHHPEKLRLLYQVIDGLPAEFVLGKDGKPPEKVLKESMPYTQSLLANGDAIGYHAKAAPPTVTMPRLKAMVSGAIGGFLDVAFNFNTQALLDDNILGQFFRIGWKMVMLGDETWLKLFPGLFMRHDGVSSFFVKDTVQVDRNVSRHLPDELNSDDWNLLILHYLGLDHVGHTGGRNSPLMPAKLKEMDDIVRTMHLRAMMDRSHDQGQTLLIIVSDHGMTENGNHGGSSYEETDSLMLFIGLNSNISDYASATNNVAFQVDLAPTLALLFGVPIPKNNVGVLVPGTLCSLRDFEQLRALELNSWQLLRLMLAQIQSSSFPRVSCNCFLDGTCEGLDLDISECSGDKEKQLICLFRNAAALHGIWKSKKSTESSSTMEDFSRALDAYNTFLKTASEWLASKTTEKPVLLLGLGVSAMLLSCFICGTVFLSLFKEVYHEPKDRVCSLSNLLNLEEVFIFALLLILVISMGSSSMVEEEHYIWHFMVSTFHLLLLFKTAKSFKISKGMNILRDFKFGSIFSLLISGRLLRGWHQGGVNWTYLPDISKWLVQGGSGYVKWIQLISIILVIGLGLYTLFRTGSNRKGVRILAFGFSTCGFLVLLHVGRYQDELSTGFGATVTVKVIYYLLSISSIGASLVLPWSALNKDKSFLAEVGDCLYLIGSAYILCWCLLQQLLQQPINSGPILLLLLQILAILCLSSSDFQVNEWVEITALYYMGMAGHFALGNSNTLATIDVAGAFIGISSHSTILSGILMFMITYASPMLFLLSLVMYIGANLRNHSNSTISTHRETTKARVPLPCSALHQLNTLDRIYCGLTTHEKSPLCMERLLSQVSL

SEQ ID NO: 11 - DNA, 633 bp, Arabidopsis thaliana
  CDS (1)..(633)
atggcgagagaaaagattcagatcaggaagatcgacaacgcaacggcgagacaagtgacgttttcgaaacgaagaagagggcttttcaagaaagctgaagaactctccgttctctgcgacgccgatgtcgctctcatcatcttctcttccaccggaaaactgttcgagttctgtagctccagcatgaaggaagtcctagagaggcataacttgcagtcaaagaacttggagaagcttgatcagccatctcttgagttacagctggttgagaacagtgatcacgcccgaatgagtaaagaaattgcggacaagagccaccgactaaggcaaatgagaggagaggaacttcaaggacttgacattgaagagcttcagcagctagagaaggcccttgaaactggtttgacgcgtgtgattgaaacaaagagtgacaagattatgagtgagatcagcgaacttcagaaaaagggaatgcaattgatggatgagaacaagcggttgaggcagcaagtatgtgtcttaccctctctgttgataacaaatccctttcttttgtctaccattaacgtacacacccctaaatttaatccccagttgtctacaacacatatgtttgatcatactgtgagataa

SEQ ID NO: 12 - protein, 210 aa, Arabidopsis thaliana
MAREKIQIRKIDNATARQVTFSKRRRGLFKKAEELSVLCDADVALIIFSSTGKLFEFCSSSMKEVLERHNLQSKNLEKLDQPSLELQLVENSDHARMSKEIADKSHRLRQMRGEELQGLDIEELQQLEKALETGLTRVIETKSDKIMSEISELQKKGMQLMDENKRLRQQVCVLPSLLITNPFLLSTINVHTPKFNPQLSTTHMFDHTVR

SEQ ID NO: 13 - DNA, 1215 bp, Arabidopsis thaliana
  CDS (1)..(1215)
atggaaccaatcccaaatgatctcattctcgagatcttctcgagattgccggcgaagtcagtcattggatttcgtaccttgtcgaagcactgggcgtctattcttcgcagtccagttttcaccgagctcttcctgaccagatcctcgaatcgtccacgtctgctgtttgctgccgaacgaaatggtgagtggctcttcttctcgtcgccgcagccacagaatcgatatgagaagtcttctcatttggattatcatacaaaattctcaggagacgtaagccgattcatttgtagctatgtctcaggtttgctctgtttccctgatttgtggctctcaaaagatgcatcgcctgtgatttgtaaccctaccacaggaatgtatgagagcttacctgatctgatgaggtacaaaaatgctcgaggctttctagggtttgatcccattggtaagcaattcaaggtattgtctgaggcttatccattttctgatcaaagggaacatcatgagattctgacattaggaactgaggaactgagctggaggagtaatatcattagttgtcctgcatatgatcgttctttgagtgaaggaatatgtatcaatggagttttgtattacttagctcagactcttggtgtaccgtcttgtgtgatcatttgctttgatgtaaggtctgaggaatttaagtattttgacgcaggatgctttaatgatcaacttgatgatactagtgggttgattttggtaaactatgagggtaaattaagtgggattaattggaagtatggtcaagctggtgaaaggcgcaccgttgagttgcgtatgtgggttctagaggatgccgagaagcatgaatgggttaaatatgtgtacactctgccggagaatgaagtccttgattcctgcgacttttcagttgctggagtgactactagaggtgatattgttttgtgtatgaaatatacatgtaaaccgttttatgtgttctacttcaatcccgagaggaacactctccagagcgttgaaatccaagattttggagctaaccttgaagcggttgagaattgtggtagagtttatgcttttgttaaccatgtagaggatcttcgggttaacaaagggaagcaactcaagtcaagcatctctcaagtcaagcatctctgctcatgctgtaacaaagtatcgcagcctgattatcattaccaaaaggcttaa

SEQ ID NO: 14 - protein, 404 aa, Arabidopsis thaliana
MEPIPNDLILEIFSRLPAKSVIGFRTLSKHWASILRSPVFTELFLTRSSNRPRLLFAAERNGEWLFFSSPQPQNRYEKSSHLDYHTKFSGDVSRFICSYVSGLLCFPDLWLSKDASPVICNPTTGMYESLPDLMRYKNARGFLGFDPIGKQFKVLSEAYPFSDQREHHEILTLGTEELSWRSNIISCPAYDRSLSEGICINGVLYYLAQTLGVPSCVIICFDVRSEEFKYFDAGCFNDQLDDTSGLILVNYEGKLSGINWKYGQAGERRTVELRMWVLEDAEKHEWVKYVYTLPENEVLDSCDFSVAGVTTRGDIVLCMKYTCKPFYVFYFNPERNTLQSVEIQDFGANLEAVENCGRVYAFVNHVEDLRVNKGKQLKSSISQVKHLCSCCNKVSQPDYHYQKA

SEQ ID NO: 15 - DNA, 1767 bp, Arabidopsis thaliana
  CDS (1)..(1767)
atggcagtaggaaaggttgtggtatctgtggcatcactcctcctagtggtgggtgttgccataggagttatcacgttcgttaataaaggaggcggcgccaatggcgacagtaatggtcccataaactctcatcagaaagcggttcagacaatttgccagtcaaccacagaccaaggttcgtgcgcgaaaacactcgacccagtcaaaagtgatgatccaagcaagcttgtcaaagccttcctgatggctactaaagacgcgatcacaaaatcctcaaacttcacggcttcgaccgaaggaggtatgggtactaacatgaacgcgaccagcaaagccgttcttgattactgcaagagagtattgatgtacgctcttgaggatcttgagaccattgttgaagagatgggtgaggatcttcagcagagtggaactaagcttgaccagctcaaacaatggttaactggagttttcaactaccaaaccgattgtcttgacgacatcgaggaagttgagctaaagaagatcatgggtgaaggaatctctaactccaaggttttgaccagtaacgctatcgatatcttccattccgttgttaccgcgatggcccaaatgggtgtcaaagtcgacgatatgaagaacataaccatgggagccggagccggtggagctgcacgtcgccttcttgaagacaacgactctaagggactccccaaatggttttctggtaaagacaggaagcttatggctaaggccggacgtggcgctccagctggcggtgatgatggtatcggtgaaggcggtggtggtggcggtaagatcaaggcgactcatgtagtggctaaggatggaagtggacagtttaagaccatttctgaggcggttatggcttgcccggataaaaaccctggaaggtgcattatccatatcaaggctggtatctacaatgaacaagtcagaatccctaagaagaagaacaacattttcatgttcggtgatggtgctacacaaaccatcattacctttgacagaagtgttaaacttagcccaggaaccactacttcactcagtggcaccgttcaggtcgaatctgagggattcatggcgaaatggattgggtttaagaacactgctggtccattgggacaccaagcggtcgcactccgtgtgaacggagaccgtgcggtcatattcaactgtagattcgacggttaccaagacacactctacgtcaacaacggacgtcaattctacaggaacattgttgtatccggtacagtggatttcatcttcggaaaatccgcaactgtgatccaaaactctctcatcctcgtccgaaagggaagccccggacaatccaactacgttacggctgacggtaatgaaaagggtgcagcgatgaagatcggtatcgtcctccataactgccgtatcataccggacaaggagctcgaagctgacaagctaaccatcaaatcgtacctaggaaggccgtggaagaagtttgccacgactgtgattattggaactgagattggtgatttgattaaaccagaaggatggaccgaatggcaaggagaacaaaaccacaagactgctaaatacattgagttcaataaccgtggaccgggagctgccactactcagaggcctccttgggttaaggtggctaagtctgcggctgaggttgaaacttacaccgtggctaactgggttggtccagctaactggatccaagaagccaacgtgcccgtccaactaggattgtaa

SEQ ID NO: 16 - protein, 588 aa, Arabidopsis thaliana
MAVGKVVVSVASLLLVVGVAIGVITFVNKGGGANGDSNGPINSHQKAVQTICQSTTDQGSCAKTLDPVKSDDPSKLVKAFLMATKDAITKSSNFTASTEGGMGTNMNATSKAVLDYCKRVLMYALEDLETIVEEMGEDLQQSGTKLDQLKQWLTGVFNYQTDCLDDIEEVELKKIMGEGISNSKVLTSNAIDIFHSVVTAMAQMGVKVDDMKNITMGAGAGGAARRLLEDNDSKGLPKWFSGKDRKLMAKAGRGAPAGGDDGIGEGGGGGGKIKATHVVAKDGSGQFKTISEAVMACPDKNPGRCIIHIKAGIYNEQVRIPKKKNNIFMFGDGATQTIITFDRSVKLSPGTTTSLSGTVQVESEGFMAKWIGFKNTAGPLGHQAVALRVNGDRAVIFNCRFDGYQDTLYVNNGRQFYRNIVVSGTVDFIFGKSATVIQNSLILVRKGSPGQSNYVTADGNEKGAAMKIGIVLHNCRIIPDKELEADKLTIKSYLGRPWKKFATTVIIGTEIGDLIKPEGWTEWQGEQNHKTAKYIEFNNRGPGAATTQRPPWVKVAKSAAEVETYTVANWVGPANWIQEANVPVQLGL

SEQ ID NO: 17 - DNA, 648 bp, Arabidopsis thaliana
  CDS (1)..(648)
atgaacactccaatcaaactcttctttctcttcatattcgttgccgcaaccgcaacggctaaaccagtcaaacgaacgaactaccttttcacaccgcacgccaaagcagtcgcgggaatctgcaccgttatcccaacggacacaagtctatgttgcaaaacccttaaacacgttcctaccaatgaccccatcgaactaatccgagcattagtggctgccgctgaaacatccgtcaaacaaagtgtgactttcctctctggaatcaaaccaaaacacatgtcagacgcaaccgcaaccgcagtggtcaacagctgcgagaaaaacttgaattacgcgttggaagatttcgccgatttttggaaagctacggggaaagatgtaacgacgttggctcataattattttacgtgtaaaaaagagttaatgtcaatcatggggtatcattcgacttgtttggacgatattgaagacaagattttgttgaaggaagtggggattgggattggagttgggaagaatctaacaagtgattcttttgatgtgtttaataacttgaatactattttcaagacttttggtattaaggtgaagcttaacgaggaagacacttcgccccgaccgccacccttgtctgattattattactga

SEQ ID NO: 18 - protein, 215 aa, Arabidopsis thaliana
MNTPIKLFFLFIFVAATATAKPVKRTNYLFTPHAKAVAGICTVIPTDTSLCCKTLKHVPTNDPIELIRALVAAAETSVKQSVTFLSGIKPKHMSDATATAVVNSCEKNLNYALEDFADFWKATGKDVTTLAHNYFTCKKELMSIMGYHSTCLDDIEDKILLKEVGIGIGVGKNLTSDSFDVFNNLNTIFKTFGIKVKLNEEDTSPRPPPLSDYYY

SEQ ID NO: 19 - DNA, 408 bp, Arabidopsis thaliana
  CDS (1)..(408)
atgagattgcttcaagaacttgttcccggatgcaacaagatcaccggaaaagcggttatgctcgatgaaataatcaactatgttcagtcattgcaacagcaagttgagtttttgtctatgaaacttgcgacggtgaatccagagatcaatattgatatagacaggattctcgccaaagatcttctgcagtcaagagacagaaacactcctacactcgggctgaatccttttgccggttttcaagggaacataccaaacctttctgccaccacaaatccacaatacaacccactacctcagacaacactagagagtgaactacaaaacctttaccagatgggattcgtctcaaatccatcgactatgtccagtttctcacctaatggtcgattgaaacctgagctctag

SEQ ID NO: 20 - protein, 135 aa, Arabidopsis thaliana
MRLLQELVPGCNKITGKAVMLDEIINYVQSLQQQVEFLSMKLATVNPEINIDIDRILAKDLLQSRDRNTPTLGLNPFAGFQGNIPNLSATTNPQYNPLPQTTLESELQNLYQMGFVSNPSTMSSFSPNGRLKPEL

SEQ ID NO: 21 - DNA, 2979 bp, Arabidopsis thaliana
  CDS (1)..(2979)
atggaagacgcctacgccagatctgtctcagaggtgcttgatttctttggggtagacccaacaaagggtctttctgattctcaggttgttcatcattccaggctttatggcaggaatggaacgccattctggaaactggttctgaaacagtttgatgatttacttgtcaagatattgattgtggctgcaattgtttctttcgtattggctttggctaatggagagactggtttaacagcatttctggagccttttgtcattctgctgatattggctgcaaatgcggcagtgggggtgatcacggagactaatgctgagaaggctcttgaggagctacgtgcctaccaagcaaatatagctacagtgttgcgaaatgggtgcttctctatcctaccagcaacagagctggttccaggcgacattgttgaagttactgtgggatgtaagattccagctgacctgaggatgattgagatgtctagcaatacgtttcgagttgatcaagccattctaactggtgaaagctgttccgtggaaaaagatgttgactgtactttaacaacaaatgctgtctaccaagacaagaaaaatattttattttcgggaactgatgtggtcgcgggtaggggaagggctgttgtcattggagttggttcaaacaccgcaatgggtagcatacacgattctatgttgcagacagatgatgaggcaactccattgaaaaagaagctggacgagtttggcagctttttggctaaggtaattgcgggtatttgtgtacttgtgtgggttgtcaacattggtcacttcagtgacccttctcatggtggattttttaaaggcgcaattcactattttaagattgcagttgcccttgctgttgcagctattcctgaaggacttcctgctgtcgtgacaacgtgtttagctcttggaacaaagaaaatggctcgtttgaatgctattgtacggtcattaccatctgtcgagacgcttgggtgcactactgtaatttgcagtgacaagactggaacattgacaaccaatatgatgtcggtgtctaagatatgtgtagtccaatctgcagagcatggtcctatgattaatgaattcactgttagtgggacaacttatgcaccagaaggtaccgtctttgacagcaatgggatgcagcttgacttacctgctcagtcaccttgccttcatcatttagcaatgtgttcatcactctgcaatgactccatcttgcaatacaatccagataaggattcttatgaaaaaattggagagtcaactgaagttgctcttcgagttcttgcagaaaaggttgggctccctggttttgattcaatgccttctgctctaaacatgttgagcaagcatgaacgtgcatcatattgcaaccattattgggaaaaccaattcaaaaaggtttatgttttggagtttactcgtgaccgaaaaatgatgagcgtcctatgtagccataagcaaatggatgttatgttctcaaagggtgctccagagagtataatagctaggtgtaataaaattctctgcaacggtgatggttctgttgttcctctaactgctgctggccgtgcagagcttgagtcgaggttttacagttttggcgatgaaacattgagatgcttagcattagcatttaagaccgtgccccacggtcaacaaactatttcctatgataatgagaacgacctgacgtttattgggttggtgggaatgcttgatccaccaagagaagaagtgagagatgctatgcttgcgtgtatgactgctgggatacgtgttatagttgttactggggataacaagtccacagcagagtcactatgtagaaaaataggggcttttgacaatctggtagacttttctggtatgtcctacaccgcttctgaatttgaacggcttccagcagtgcagcaaactctagcattgcgacggatgacacttttttccagggttgaaccttcccacaaaaggatgcttgttgaagccctacagaaacaaaacgaagtggtggcaatgactggtgatggcgttaatgatgcccctgcattgaagaaagctgacattgggattgccatgggttctggaacagctgtagcaaagagtgcttcagatatggttttggctgatgataattttgcttcaatagttgcggctgttgcagaaggaagggctatatataataacacaaagcaattcattagatacatgatttcttcaaatataggggaagtggtctgtatatttgttgcagctgtactgggaatccctgataccttggcacctgttcaacttctgtgggtcaatttggtaacagatggattgcctgccactgccattggctttaataaacaagattccgatgttatgaaggcaaaaccccgaaaggttggtgaagcagtggtcactgggtggttattcttccgctatttggttatcggagtttatgtcggcctggccactgttgctggctttatatggtggtttgtttactctgatggtggtcctaaacttacttacagtgaactgatgaactttgaaacttgcgcacttagagagacaacttatccctgcagcatatttgaggatcggcacccatctactgtggctatgacagtacttgttgttgtcgagatgtttaatgctctaaataacctcagcgaaaatcaatcccttctggttataaccccaaggagtaacttatggcttgttggttcaattatcctgacgatgcttctgcacgtgctaatattatatgttcatccactggcagtcttattttctgtcacgccattatcctgggccgagtggactgctgttctgtatctttcgtttccagttatcatcatcgatgagcttctgaagttcctctctagaaatacaggcatgagattcaggttcagattgaggaaggctgatttactccccaaggaccggcgtgacaagtag

SEQ ID NO: 22 - protein, 992 aa, Arabidopsis thaliana
MEDAYARSVSEVLDFFGVDPTKGLSDSQVVHHSRLYGRNGTPFWKLVLKQFDDLLVKILIVAAIVSFVLALANGETGLTAFLEPFVILLILAANAAVGVITETNAEKALEELRAYQANIATVLRNGCFSILPATELVPGDIVEVTVGCKIPADLRMIEMSSNTFRVDQAILTGESCSVEKDVDCTLTTNAVYQDKKNILFSGTDVVAGRGRAVVIGVGSNTAMGSIHDSMLQTDDEATPLKKKLDEFGSFLAKVIAGICVLVWVVNIGHFSDPSHGGFFKGAIHYFKIAVALAVAAIPEGLPAVVTTCLALGTKKMARLNAIVRSLPSVETLGCTTVICSDKTGTLTTNMMSVSKICVVQSAEHGPMINEFTVSGTTYAPEGTVFDSNGMQLDLPAQSPCLHHLAMCSSLCNDSILQYNPDKDSYEKIGESTEVALRVLAEKVGLPGFDSMPSALNMLSKHERASYCNHYWENQFKKVYVLEFTRDRKMMSVLCSHKQMDVMFSKGAPESIIARCNKILCNGDGSVVPLTAAGRAELESRFYSFGDETLRCLALAFKTVPHGQQTISYDNENDLTFIGLVGMLDPPREEVRDAMLACMTAGIRVIVVTGDNKSTAESLCRKIGAFDNLVDFSGMSYTASEFERLPAVQQTLALRRMTLFSRVEPSHKRMLVEALQKQNEVVAMTGDGVNDAPALKKADIGIAMGSGTAVAKSASDMVLADDNFASIVAAVAEGRAIYNNTKQFIRYMISSNIGEVVCIFVAAVLGIPDTLAPVQLLWVNLVTDGLPATAIGFNKQDSDVMKAKPRKVGEAVVTGWLFFRYLVIGVYVGLATVAGFIWWFVYSDGGPKLTYSELMNFETCALRETTYPCSIFEDRHPSTVAMTVLVVVEMFNALNNLSENQSLLVITPRSNLWLVGSIILTMLLHVLILYVHPLAVLFSVTPLSWAEWTAVLYLSFPVIIIDELLKFLSRNTGMRFRFRLRKADLLPKDRRDK

SEQ ID NO: 23 - DNA, 1632 bp, Arabidopsis thaliana
  CDS (1)..(1632)
atggaaggggaagaagacactgtggcgggttctagcataccaaagaagaaaatgatgaaacagctgacaggaaaacgcgacgacactctgcttcattcagcagtgagacacggaaacaaagacagagttgttgagattcttacgaaaaccagagagtctgagttgaatcagctgttggggaaacagaaccagtcaggcgaaaccgcactctatgttgcagcagagtatggtgatgtagagattgtcaaggagatgatcaactgctatgatcttgctctcgttgagatcaaagcaaggaacggatttgatgctttccacattgctgcaaagcaaggagatctcgatgtgttgaaggttttagcagaggctcattcggagttagcgatgacggtggatctatcaaacactacggcactgcacacagcggcaacacaaggacacactgaagtggtaaactttcttttggaactgggaagcagccttgctggaattgccaagagcaatggtaagacggccctgcactctgcatcaaggaacgggcatgtcaaagtcattaaggctctcttggcatccgaacctgcgatcgcaataaggatggacaagaagggccaaacagcccttcacatggcggttaaaggaacaaatgttgaggtcgtggaggaacttatcaaagcagataggtcttctatcaatatagccgacacaaagggaaacacagcgttgcacattgcagcccgaaaaggcagatctcagattgtcaagttgctattagccaacaacatgacagacacaaaagctgttaaccgatcaggcgaaaccgcacttgacacagcagagaaaattggaaatccagaagtggctcttattttacagaaacatggtgttcccagcgccaagaccattaagccatccgggcctaaccccgctcgggaactgaaacaaaccgtaagcgatatcaagcatgaggttcacaatcagcttgagcacacacgcctgaccagaaaacgtgttcaaggaatcgccaaacagcttaacaaaatgcacactgaaggtcttaacaatgcaatcaactcgactactgttgtagctgttcttattgccacggtcgcttttgcagcaattttcactgtcccggggcagtatgtagaagacacaagtaaaattccagatgggcattccctcggggaggcgaatattgcatcgacgactccgttcataattttcttcatctttgattcgatcgcactcttcatctccttagcggtcgtggtggttcagacatcagtggtggtaatagagagcaaggccaagaaacagatgatggctgtgataaacaaactcatgtggcttgcctgtgttctcatctctgttgcctttttggctttgtcgtttgttgttgttggtgaagaagagaagtggctagccatttgggtgactgctatcggggcaactataatgattacgacgttagggacgatgtgctactggataatacagcacaagatcgaagctgccaatttaagaaacattagaagatcctccatcaacagtatatctggatcctgggggattccccagcttacggattctgatattctccagaacgagtgtaagaaaatgtatgcaatctga

SEQ ID NO: 24 - protein, 543 aa, Arabidopsis thaliana
MEGEEDTVAGSSIPKKKMMKQLTGKRDDTLLHSAVRHGNKDRVVEILTKTRESELNQLLGKQNQSGETALYVAAEYGDVEIVKEMINCYDLALVEIKARNGFDAFHIAAKQGDLDVLKVLAEAHSELAMTVDLSNTTALHTAATQGHTEVVNFLLELGSSLAGIAKSNGKTALHSASRNGHVKVIKALLASEPAIAIRMDKKGQTALHMAVKGTNVEVVEELIKADRSSINIADTKGNTALHIAARKGRSQIVKLLLANNMTDTKAVNRSGETALDTAEKIGNPEVALILQKHGVPSAKTIKPSGPNPARELKQTVSDIKHEVHNQLEHTRLTRKRVQGIAKQLNKMHTEGLNNAINSTTVVAVLIATVAFAAIFTVPGQYVEDTSKIPDGHSLGEANIASTTPFIIFFIFDSIALFISLAVVVVQTSVVVIESKAKKQMMAVINKLMWLACVLISVAFLALSFVVVGEEEKWLAIWVTAIGATIMITTLGTMCYWIIQHKIEAANLRNIRRSSINSISGSWGIPQLTDSDILQNECKKMYAI

SEQ ID NO: 25 - DNA, 801 bp, Arabidopsis thaliana
  CDS (1)..(801)
atggcttccttcgtggaatctggttggcagtaccttgtgacacattttagcgactttcaactggcatgtattgggagttttctcctccatgaaagcgtgtttttcttatctggactccctttcatttttcttgaaaggcaaggctttctcagcaagtacaaaattcagacaaaaaataacacacctgcagcccaaggaaaatgtattactcgcctgttgctttatcatttctccgtaaacttgcccctgatgttggcctcctaccctgtcttccgagccatgggaatgcgaagcagttttcctctgccgtcctggaaagaagtgtctgcccagatattattctactttatcattgaggattttgtcttctattggggtcatcggatcttgcattcaaaatggctgtacaagaacgtgcatagtgtgcatcatgaatatgccacaccatttggtttgacatcagaatatgctcaccccgctgagattctatttctgggttttgctaccatagtcggtccagctcttactggccctcacctaattactctctggttatggatggtgttgagagtgctggagacagttgaggcacattgtggttatcatttcccatggagcctctcaaattttcttcctctgtatggaggtgctgacttccatgactaccatcaccgactgctatacacaaagtccggaaactactcttcaacttttgtgtatatggactggatctttggtactgacaaggggtacagaagactgaagacccttaaagaaaacggtgacatgaaacaaacgtga

SEQ ID NO: 26 - protein, 266 aa, Arabidopsis thaliana
MASFVESGWQYLVTHFSDFQLACIGSFLLHESVFFLSGLPFIFLERQGFLSKYKIQTKNNTPAAQGKCITRLLLYHFSVNLPLMLASYPVFRAMGMRSSFPLPSWKEVSAQILFYFIIEDFVFYWGHRILHSKWLYKNVHSVHHEYATPFGLTSEYAHPAEILFLGFATIVGPALTGPHLITLWLWMVLRVLETVEAHCGYHFPWSLSNFLPLYGGADFHDYHHRLLYTKSGNYSSTFVYMDWIFGTDKGYRRLKTLKENGDMKQT

SEQ ID NO: 27 - DNA, 7608 bp, Arabidopsis thaliana
  CDS (1)..(7608)
atggattccgtctctagaggtgccgttgcttcaacaaccggcggtgctgtggaagagccggagtatctagctaggtatcttgttgttaaacattcatggagaggtcgttataagaggatcctttgtatttcgagcggcggaattgttacgcttgatcctaatactcttgctgttactaattcttatgatactggaagtaattttgatggtgcttcacctctggttggaagagatgagaacacggagagtgttggtggtgagtttactgtcaatgttagaacggatgggaaagggaaatttaaggctatgaagttctcttctaggtgcagagcgagtattttgaccgagttgtatcggcttagatggaatcaaattagacctgtggctgagtttcaggtgctacatcttaggagacggaacgcagaatgggttccttataaattgaagatcacctttgtcggtctggagcttgtcgactcaaaatctggtaattcacgctggattttggatttcagagacatgggttccccagcaatcattcttctctctgatgcataccggacaaaatctgcggactctgctgggtttgttctgtgtcccatgtatgggagaaagtcaaaagcttttagagctgcacccgggacaacaaattcctccattgtcgcaagtttggctaagactgcaaagtccatggttggggtattcttgtcagtcgatgattcacaattgctgacagtatcagagtatatgacacgaagggctaaagaagcagttggagctgaagaaactcctaatgggtggtggtctgttactagattaagatctgctgctcatggaactctgaacatgcctggactaagcttagcaattggccccaaaggaggacttggtgagcatggggatgctgtagcccttcagcttattcttactaaggcctcccttgttgagagacgaatagataactatgaagttgttatcgttcgtcctctatcttcagtaagttcacttgtccggttcgctgaggaaccccaaatgtttgctatcgaattcagtgatggatgtccagttcttggacactgcccgataccagtattaccaaggcttactatgcctggtcatcgcattgatccaccttgtggaagggttagtttgatctctggaccacaacatcttgttgctgatttggaaacttgctccctacatctgaaacatttagctgctgctgcaaaagatgcagttgccgaaggtggttctgttcctggttgtagggctagattatggcgcagaataagggagttcaatgcttgtatcccgtatacaggtgtgcccgctaatagtgaagtccctgaggtgactttgatggcattaattacaatgctaccatcaactccaaatctccctgtagacgcccctcctttgccacctccttcacccaaagcagcagcaactgtcattggctttgttacatgtttgcgtaggttattgtcatccaggagtgcagcatcccatataatgtcattccctgctgctgttaacaggataatgggtttacttaggaacggttctgaaggtgtagctgctgaagctgcggggcttattgcgtccctcataggcggttggtcagcagatctgagcactgcaccagattccagaggagaaaaacatgcaactatcatgcataccaagtctgttttgtttgctcaacagggttatgttactattctggtcaatcgattgaaacccatgtcagtctcacctctgttttccatggcgattgttgaagtctttgaggctatggtttgtgatccacacggagagactacccaatacactgtttttgtagaattgttacgacagatagctgccctacgacgtcgtttatttgcactctttgcacatcctgcagagagtgttagggaaaccattgctgttatcatgcgtacaatagctgaagaagatgcaattgctgcagagtcaatgcgtgatgctgctttgcgcgatggtgctttgttgagacatttattgaatgcattttcccttcctgccagtgagcggcgcgaggtaagtaggcagcttgtggcactctgggcagattcttaccaaccagctttggatctactgtctcgagttctgcctcctgggcttgttgcatatttgcatacacgtcccgatgatgttgtcgatgatacagatcaagaaggttcttcaacaaataggcggcagaaaagattacttcagcagagaagaggtcgcatagctaagggaatgggtgctcaagatattcctcttccccctggtaataatgttgaggctggcgatgcagcaaaacatatgagtgcaaatgctagtgtacccgataactttcaaaggcgggcagcagattcttcctctgaagcttccaatcctcaggcttctgcttttccaggtgttgacagtactattgcaggggtttcacaaaatggctatccagcatttgcttcagtcaccacaaatgcaaatgggcatgagcaacctgagactaatgcatccgatgtggttggttctgacccaaacttgtatggcatccagaattcagtgcttccagcacctgctcaagttattgtagaaagtacagctgtaggatccggaaagctacttctaaattggcgtgagttttggcgagcctttggccttgatcataatcgtgcagatctcatctggaatgagcgtacaaggcaagaattaatagaagctttgaaggctgaagtccacaacctagatgtcgagaaagagcgcacagaagatatttcccctggtgatgtcgaggccacaactggccaggagattatcccacgtatatcttggaactattctgaattctctgtcagttatcgtagcttatcaaaagaagtttgtgtgggccagtattacctacgcttattgcttgaaagtggcaacgctggcaaggcacaagatttccctctccgtgatccagttgcttttttcagggcactctatcatcgtttccagtgtgatgctgatatggggcttactattgatggtgctgttccagatgaattgggttcatcaggcgactggtgtgatatgagtaggcttgatggttttggtggagggggaggagcttctgttagggagctttgtgcaagagcaatggcgattgtctatgagcaacactacaacacaataggtccttttgaaggcactgcacatattacagcactgattgataggacgaatgatagagctttgaggcatcgcctactacttctcctaaaggccctagttaaggtcttgttaaacgtcgaaggttgtgttgtggttggtggttgtgtcctagctgtagatctgctgactgttgttcatgaaaactcggagaggactcctattccattacagtccaatttaattgctgctactgcatttatggaaccacctaaggaatggatgtacatagacaaaggtggtgcagaagtgggacctgtagagaaggacgtcatcagaagtttatggtccaaaaaggatattgactggacgacaaagtgtcgggctttaggaatgtcagactggaagaaattgcgtgatatccgtgaacttagatgggcagtagctgttcgagttccagtcctcacacctagtcaggtaggggatgctgcattgtccatattacatagcatggtttcggcacattcagatttggatgacgctggagagattgtaactccaacaccaagagtaaaacgtatcttgtctagtacacgttgtcttcctcacattgctcaggctttgctatctggcgaaccagttattgtggaggctggtgctgctctcttgaaagacgttgttaccagaaactctaaggcaatgatccgactgtacagtacaggggccttttactttgcccttgcttaccctggatctaatctttactcaatcgcacaactcttctcggtcacccatgtccatcaagctttccatggtggggaagaagctactgtttcctcctctctgcccctggctaaacgaagcgtattgggtggtcttctcccagagtccttactatatgtattagagcgcagtggaccagctgcgtttgcagctggcatggtttctgattccgatacgccggagattatatggacacataaaatgcgagcagaaaatcttatatgtcaggttttgcagcatcttggtgattatcctcagaaattgtcacagcactgccattctctctatgattatgctcccatgccacctgttacgtatccagaacttagagatgagatgtggtgtcaccgttattatctcagaaatttatgtgatgagattcaatttcctaattggccgattgttgaacatgttgagttcttacaatcattacttgtgatgtggcgtgaagagttgactaggaaacccatggatctttctgaaggagaagcttgcaaaattctagaaatatccctgaacaatgtatcaagtgatgacctaaaccggactgcttcagttgagttgaatgaggaaatatctaatatatccaaacaaattcaaaaccttgatgaagagaaactaaagcgccagtataggaagcttgcaatgaggtaccatcctgacaagaatccagaaggaagagaaaagttcctggctgttcaaaaagcttatgaatgcctacaggcaacaatgcaaggattgcaaggtcctcagccgtggaggttgctgcttttactgaaagcgcagtgcatcttatatcgccgttatggacatgtgttacgaccgttcaaatatgctggctatccgatgttacttgatgcagttacagtggacaaggatgacaacaactttctatctaatgatagatcccctcttcttgttgcagcatctgagcttgtttcgttaacctgtgctgcctcgtcattgaatggtgaagaattagtgagagatggtggtgtgcagcttctatcaactcttctttcccgctgcatgtgtgtggttcagccaacaacttcacaacacgaaccagctgcgatcattgtcacaaatgtaatgcgtacactttcggtaataagtcagtttgagagtgcgagggctggatttctagagttacccagtctgattgaagacattgtgcactgtacggaattagaacgtgtgcctgcagccgttgatgctgctctccagtccattgccaaggtttctgtcttccccgaacttcagcatggtctgctaaaggctggtgccttatggtatattctcccattattactacagtatgactcaactgctgaggaatctaattctgtcgagtctcatggggttggagttagcattcaaattgccaagaatgagcatgccttacaagcatcacaagccctatcaaggcttactgggctgtgtgcagatgagagtttgacaccttacaatgctactgcggctgatgttctcaaagcattactgacgccaaaacttgctagtttgttgaaagatgaagttgccaaggatttgttatccaaactgaacacaaatttggagacaccagagattatctggaactctgcaactcgatcagagcttttaaattttgtggatgaacaacgcgcctgccagtgccctgatggttcatatgatctgaaaaatgctcaatctttttcgtatgacgcactgtcaaaagaggtctttgttggcaatgtttacttgaaggtctataatgatcaacccgactcagagatcagtgaaccagaatcattctgcaatgccctaatcgactttatatcatcattagtgcatactgagttgccctctgtttccgaggaccaaaatttgatcgaagacagaaactcatctaatgatactccagagcttcaaagtagcgtcgcagaaccgtcgttgattgaagaacattccgatcatcagccatcatctgaggggatgaagaacgaagaatgttttctgattgatcacctccaattaggattgactgctcttcagaacttgcttacaaagtatccagatctggcttcagtgttttcgtctaaggagagattgttacctctctttgaatgtttttctgtggccattgcatcaaaaacagatattccaaaactctgcctcaatgtcctctctcggttaacagcttatgctccttgcttggagacgatggtatctgatggatctagtcttcttctcctcttacaaatgcttcattctgcaccttcttttcgcgagggtgctctccatgttctttatgctttggcaagcacaccagaacttgcttgggctgctgcaaaacatgaagaaattcccttgcagcaaagagctgcagcggcttctttgttggggaagctcgtcgcacaaccaatgcatgggcctagagttgctatcacacttgtgagattccttcctgacggtcttgtatctataattcgtgatggacctggggaggctgttgtccatgcacttgagcggaccactgagactccagaacttgtgtggacaccagcaatggcagcatctttatccgcacagattgcaaccatggcatcagatatttatcgtgaacaacagaagggttctgttattgaatgggatgtaccagagcagtcagctggtcaacaagaaatgagagacgagccacaggttggtggaatctatgtcaggcgtttcttaaaagatccaaaatttcctctgagaaatccaaaacgattcttggaaggactgctggatcagtatttgtcagcaatggccgcaacacattacgaacaacatcctgttgaccctgagctccctctccttctctctgctgcattggtttctttgttgcgtgtgcatcctgcacttgcagatcacattggacatcttgggtatgtcccaaaacttgtcgctgctgtggcatatgaggggaggcgggaaacaatgtcttctggcgaagtgaaggctgaagaaattggctctgatggagtgaatgagtctactgatccctcaagtctacctgggcaaacccctcaagaacgtgtgcgccttagttgtttacgtgtgcttcatcaacttgcagctagtaccacatgtgctgaagcaatggctgcaactagtgctggaaatgcacaggtggttccacttctcatgaaagcaataggatggcttggtggaagcattttagcactcgagacacttaagcgtgttgttgttgctggaaatcgggccagagatgcgcttgttgcgcagggtctaaaggttggtctcattgaggttcttcttgggctgcttgactggaggacggggggtaggtatgggctcagttctcacatgaaatggaatgaatcggaagcatcaatcgggcgggtacttgcagttgaggttagtgttgaatttgttagcgagatgtttgttatgtgtgttacacatgtattgcatggttttgcaacagaaggagcacattgctcaaaagtgcgtgagatacttgacgcgtcagaagtgtggagtgcatataaagaccaaaagcatgacttgttcctgccatcaaacacacaatcagcggcaggggtggctggctttattgagaactcatccaacagtctcacttacgctcttaccgctcctcctccgccttcgcatccttga

SEQ ID NO: 28 - protein, 2535 aa, Arabidopsis thaliana
MDSVSRGAVASTTGGAVEEPEYLARYLVVKHSWRGRYKRILCISSGGIVTLDPNTLAVTNSYDTGSNFDGASPLVGRDENTESVGGEFTVNVRTDGKGKFKAMKFSSRCRASILTELYRLRWNQIRPVAEFQVLHLRRRNAEWVPYKLKITFVGLELVDSKSGNSRWILDFRDMGSPAIILLSDAYRTKSADSAGFVLCPMYGRKSKAFRAAPGTTNSSIVASLAKTAKSMVGVFLSVDDSQLLTVSEYMTRRAKEAVGAEETPNGWWSVTRLRSAAHGTLNMPGLSLAIGPKGGLGEHGDAVALQLILTKASLVERRIDNYEVVIVRPLSSVSSLVRFAEEPQMFAIEFSDGCPVLGHCPIPVLPRLTMPGHRIDPPCGRVSLISGPQHLVADLETCSLHLKHLAAAAKDAVAEGGSVPGCRARLWRRIREFNACIPYTGVPANSEVPEVTLMALITMLPSTPNLPVDAPPLPPPSPKAAATVIGFVTCLRRLLSSRSAASHIMSFPAAVNRIMGLLRNGSEGVAAEAAGLIASLIGGWSADLSTAPDSRGEKHATIMHTKSVLFAQQGYVTILVNRLKPMSVSPLFSMAIVEVFEAMVCDPHGETTQYTVFVELLRQIAALRRRLFALFAHPAESVRETIAVIMRTIAEEDAIAAESMRDAALRDGALLRHLLNAFSLPASERREVSRQLVALWADSYQPALDLLSRVLPPGLVAYLHTRPDDVVDDTDQEGSSTNRRQKRLLQQRRGRIAKGMGAQDIPLPPGNNVEAGDAAKHMSANASVPDNFQRRAADSSSEASNPQASAFPGVDSTIAGVSQNGYPAFASVTTNANGHEQPETNASDVVGSDPNLYGIQNSVLPAPAQVIVESTAVGSGKLLLNWREFWRAFGLDHNRADLIWNERTRQELIEALKAEVHNLDVEKERTEDISPGDVEATTGQEIIPRISWNYSEFSVSYRSLSKEVCVGQYYLRLLLESGNAGKAQDFPLRDPVAFFRALYHRFQCDADMGLTIDGAVPDELGSSGDWCDMSRLDGFGGGGGASVRELCARAMAIVYEQHYNTIGPFEGTAHITALIDRTNDRALRHRLLLLLKALVKVLLNVEGCVVVGGCVLAVDLLTVVHENSERTPIPLQSNLIAATAFMEPPKEWMYIDKGGAEVGPVEKDVIRSLWSKKDIDWTTKCRALGMSDWKKLRDIRELRWAVAVRVPVLTPSQVGDAALSILHSMVSAHSDLDDAGEIVTPTPRVKRILSSTRCLPHIAQALLSGEPVIVEAGAALLKDVVTRNSKAMIRLYSTGAFYFALAYPGSNLYSIAQLFSVTHVHQAFHGGEEATVSSSLPLAKRSVLGGLLPESLLYVLERSGPAAFAAGMVSDSDTPEIIWTHKMRAENLICQVLQHLGDYPQKLSQHCHSLYDYAPMPPVTYPELRDEMWCHRYYLRNLCDEIQFPNWPIVEHVEFLQSLLVMWREELTRKPMDLSEGEACKILEISLNNVSSDDLNRTASVELNEEISNISKQIQNLDEEKLKRQYRKLAMRYHPDKNPEGREKFLAVQKAYECLQATMQGLQGPQPWRLLLLLKAQCILYRRYGHVLRPFKYAGYPMLLDAVTVDKDDNNFLSNDRSPLLVAASELVSLTCAASSLNGEELVRDGGVQLLSTLLSRCMCVVQPTTSQHEPAAIIVTNVMRTLSVISQFESARAGFLELPSLIEDIVHCTELERVPAAVDAALQSIAKVSVFPELQHGLLKAGALWYILPLLLQYDSTAEESNSVESHGVGVSIQIAKNEHALQASQALSRLTGLCADESLTPYNATAADVLKALLTPKLASLLKDEVAKDLLSKLNTNLETPEIIWNSATRSELLNFVDEQRACQCPDGSYDLKNAQSFSYDALSKEVFVGNVYLKVYNDQPDSEISEPESFCNALIDFISSLVHTELPSVSEDQNLIEDRNSSNDTPELQSSVAEPSLIEEHSDHQPSSEGMKNEECFLIDHLQLGLTALQNLLTKYPDLASVFSSKERLLPLFECFSVAIASKTDIPKLCLNVLSRLTAYAPCLETMVSDGSSLLLLLQMLHSAPSFREGALHVLYALASTPELAWAAAKHEEIPLQQRAAAASLLGKLVAQPMHGPRVAITLVRFLPDGLVSIIRDGPGEAVVHALERTTETPELVWTPAMAASLSAQIATMASDIYREQQKGSVIEWDVPEQSAGQQEMRDEPQVGGIYVRRFLKDPKFPLRNPKRFLEGLLDQYLSAMAATHYEQHPVDPELPLLLSAALVSLLRVHPALADHIGHLGYVPKLVAAVAYEGRRETMSSGEVKAEEIGSDGVNESTDPSSLPGQTPQERVRLSCLRVLHQLAASTTCAEAMAATSAGNAQVVPLLMKAIGWLGGSILALETLKRVVVAGNRARDALVAQGLKVGLIEVLLGLLDWRTGGRYGLSSHMKWNESEASIGRVLAVEVSVEFVSEMFVMCVTHVLHGFATEGAHCSKVREILDASEVWSAYKDQKHDLFLPSNTQSAAGVAGFIENSSNSLTYALTAPPPPSHP

SEQ ID NO: 29 - DNA, 3774 bp, Arabidopsis thaliana
  CDS (1)..(3774)
atggatcaagcaaaaggttatgaacatgttcggtatactgcccctgaccctagagatgagggacttggctccattaatcaaaggttttcccacgactcttcaactaatgttaacacttatgtacgacctccagattatggtgtttcaacccctgctcggccagtgctaaactactcaatacagaccggtgaagaatttgcttttgagtttatgagagatagggttattatgaaaccgcagttcatcccaaatgtgtatggtgagcacagtggtatgcctgtttctgttaacttaagtgctctgggaatggttcatccaatgtcagagagtggccctaacgctacagtgcttaacatagaagaaaaacgtcagagctttgagcacgagaggaaacccccttctagaattgaagataagacctatcatgaactggtccagtcagccccagttatctcttcgaaaaatgatactggtcaaaggcgtcatagtttggtttcttctagagcttctgatagctctttgaaccgtgcgaagttcttgtgtagttttggtggtaaagttataccccgccccagagatcagaaacttaggtatgtaggtggtgaaacgcgtatcatacggattagcaagactatttctttccaagaactcatgcataaaatgaaagaaatatttcctgaagcacgcaccataaaatatcagctgccaggagaggatcttgatgccctagtctctgtatcttctgacgaggatttacaaaacatgatggaagaatgtatcgtgtttggtaatggaggatctgagaagcccaggatgttcttgttttcaagcagtgatatagaggaggctcagtttgttatggaacatgcagagggtgattctgaggttcagtatgttgttgctgtcaatgggatggatctaagttcacggagaagttcccttggattaagtcctcccgggaacaatttggatgaactacttcatgggaattttgataggaagatcgatcgggctgctacagaaccagcagtggcttcgcttactcccttagcaggtaatgaatctttaccagcgagccaaacttctcaacctgtaacaggattttctactggaaatgagccattttcacagccttatctaggacaacaattgcagttccccggacttggtaaccaccaaatttacacgtcaggtcacatggcaagcataggctatatagatgagaagaggtctgctcctttacatgttcaaccacaacctcattatatcccgtattctgtgaatcctgaaacacctcttgaaagcctggtgccccactatccacaaaaacctgagcaaggatttttgcgtgaggagcagatctttcatgtacaagatccagaaacttcatcaaaagaggccaaaatgagaagagatgactcatttcagaaggtaaatgatcatcctatatctactgtcgagagcaatctttcagcaaaggagccaaagatgaggagagaatcctcaaccccaagggtcaatgagtatcctgtttcttctatgcctagtgatttaatagtcccagatgacctcccgaaggaagaagctccaattgtcacacaaacatctagttcaacaccagatccaagttcttcaactctctcagagaaaagtcttaggaaatccgaggaccatgttgagaacaatctgtcagcaaaggagccaaagatgagaaaagaacactccaccacaagggtcaatgaatattccgtttcctctgtatctagtgattctatggtcccagatcaagccctcaaggaagaagctcctatttccatgaagatatccaattcaacaccagatccaaaatccttggtttatccagaaaaaagtcttagaacatcccaggagaaaacgggtgccttcgatacaacaaatgaaggcatgaaaaagaatcaggacaatcaattttgtctgcttggaggattctcagtatctggacatggtacttcaaataatagttcatctaatgtgagcaatttcgaccagcctgtgactcagcaaagagtctttcattctgagcgaactgtacgagatccaacagaaactaaccgtttgtctaaatctgatgattcccttgcttctcaatttgtaatggctcaaacaacatcagatgctttcctgcctatcagcgaatcatctgaaacttctcatgaagcaaatatggagtcccagaatgttcatcctactgcgccagtaataccagctcctgatagcatctggacagccgagggtagtatgtcacagtctgaaaaaaaaaacgtggaaactaacaccccggagcatgtaagtcagacagagacttcagcaaaggctgttccacaaggacacaatgagaagggggatatagttgttgatataaatgataggtttcctcgtgagtttcttgctgatatattaaaaacgaaagagtctctgaacttccctggattagggccattgcatgccgatggagctggtgtgagtttaaatattcagaataatgaccctaaaacttggtcgtattttcgaaatttggcgcaggatgagtttgagaggaaggatctatcccttatggatcaggaccaccctggatttcccacttccatgactaacaccaacggagttcctattgattatagctacccaccattgcagtctgagaaagttgcctcaagtcagatacatccacaaatccactttgatggaaatatcaagccagatgtgtctaccattaccatacctgatttgaacacagtagacacacaagaagattacagtcagtcacaaatcaaaggtgctgaaagcacggatgcaactctgaatgctggagttcctcttattgactttatggctgcggatagtggcatgaggtctctgcaggtcattaaaaatgacgacttggaagaactgaaggaattaggttctggtacttttggaactgtttatcacggaaaatggaggggtacagatgttgctatcaagcgaataaaaaggagctgttttattggtcgttcatctgaacaagagagattgacctcggagttctggcatgaagcagaaattctttcaaagcttcatcatccaaatgttatggcattttacggcgtagtgaaagatggaccaggaggaactttagctacagtgacagagtacatggtcaatggatcgctcaggcatgttctgctcagcaacaggcaccttgatcgacgtaagcgacttatcattgcaatggacgcagcttttgggatggaatatttgcactcaaagagcatagtgcatttcgatttgaagtgtgataacttgcttgtcaacttaaaggatcccgcccgtcccatatgcaaggttggtgattttggtctgtcaaagataaaaagaaacactttggtcactggcggtgtaaggggaaccctcccttggatggctcccgagctacttagtggaagcagcagcaaagtttctgaaaaggttgatgtgttctctttcggaattgtcttatgggaaattcttaccggtgaggaaccctacgccaatatgcattatggggcaataatcggaggcatagtgaacaatacattgagaccaaccgtgccaaactactgtgacccggagtggagaatgctgatggagcagtgttgggctcctgacccatttgttcgacctgcgttcccggaaatagccagacgtctccgcaccatgtcctcctctgcggtccacacaaaaccacacgctgtcaaccaccaaatccacaagtaa

SEQ ID NO: 30 - protein, 1257 aa, Arabidopsis thaliana
MDQAKGYEHVRYTAPDPRDEGLGSINQRFSHDSSTNVNTYVRPPDYGVSTPARPVLNYSIQTGEEFAFEFMRDRVIMKPQFIPNVYGEHSGMPVSVNLSALGMVHPMSESGPNATVLNIEEKRQSFEHERKPPSRIEDKTYHELVQSAPVISSKNDTGQRRHSLVSSRASDSSLNRAKFLCSFGGKVIPRPRDQKLRYVGGETRIIRISKTISFQELMHKMKEIFPEARTIKYQLPGEDLDALVSVSSDEDLQNMMEECIVFGNGGSEKPRMFLFSSSDIEEAQFVMEHAEGDSEVQYVVAVNGMDLSSRRSSLGLSPPGNNLDELLHGNFDRKIDRAATEPAVASLTPLAGNESLPASQTSQPVTGFSTGNEPFSQPYLGQQLQFPGLGNHQIYTSGHMASIGYIDEKRSAPLHVQPQPHYIPYSVNPETPLESLVPHYPQKPEQGFLREEQIFHVQDPETSSKEAKMRRDDSFQKVNDHPISTVESNLSAKEPKMRRESSTPRVNEYPVSSMPSDLIVPDDLPKEEAPIVTQTSSSTPDPSSSTLSEKSLRKSEDHVENNLSAKEPKMRKEHSTTRVNEYSVSSVSSDSMVPDQALKEEAPISMKISNSTPDPKSLVYPEKSLRTSQEKTGAFDTTNEGMKKNQDNQFCLLGGFSVSGHGTSNNSSSNVSNFDQPVTQQRVFHSERTVRDPTETNRLSKSDDSLASQFVMAQTTSDAFLPISESSETSHEANMESQNVHPTAPVIPAPDSIWTAEGSMSQSEKKNVETNTPEHVSQTETSAKAVPQGHNEKGDIVVDINDRFPREFLADILKTKESLNFPGLGPLHADGAGVSLNIQNNDPKTWSYFRNLAQDEFERKDLSLMDQDHPGFPTSMTNTNGVPIDYSYPPLQSEKVASSQIHPQIHFDGNIKPDVSTITIPDLNTVDTQEDYSQSQIKGAESTDATLNAGVPLIDFMAADSGMRSLQVIKNDDLEELKELGSGTFGTVYHGKWRGTDVAIKRIKRSCFIGRSSEQERLTSEFWHEAEILSKLHHPNVMAFYGVVKDGPGGTLATVTEYMVNGSLRHVLLSNRHLDRRKRLIIAMDAAFGMEYLHSKSIVHFDLKCDNLLVNLKDPARPICKVGDFGLSKIKRNTLVTGGVRGTLPWMAPELLSGSSSKVSEKVDVFSFGIVLWEILTGEEPYANMHYGAIIGGIVNNTLRPTVPNYCDPEWRMLMEQCWAPDPFVRPAFPEIARRLRTMSSSAVHTKPHAVNHQIHK

SEQ ID NO: 31 - DNA, 966 bp, Arabidopsis thaliana
  CDS (1)..(966)
atggatctcgctgcagaagagcttcaatttctcaacattcaaggcatattacgtgaatccacaacaatccccaaattttccccaaaaaccttctacctcataaccctaaccctaattttccctctctccttcgcaatcctcgctcattccctctttacccaaccaatcttagctcagctagatgcaactcctccttcagatcaatctaaaaccaatcacgaatggacccttcttctcatttatcaattcatctacgtcatcttcctcttcgccttctctcttctctcaacagccgccgtcgtcttcaccgtcgcttcgctttacacgggaaagccagtttctttctcttcaacaatgtcagcgattcctctggttttgaagcgtttgttcattaccttcctttgggtttctttaatgatgcttgtgtacaactctgtcttcttgttgtttctcgttgttttgatcgtagctatcgatttacaaagcgtgattctcgctgtcttctcgatggttgtgattttcgttctgtttttgggtgttcatgtttacatgactgcttggtggcatttagctagtgtagtctctgttcttgaaccgatttacggtatcgccgcgatgaagaagagttacgagttgcttaatggaagaactaatatggcgtgttcgatggtttttatgtatcttgctctttgtggaatcactgctggtgttttcggtggtgttgtggttcatggaggtgatgatttcgggttgtttacgaagattgttgttggtggtttcttggttgggattctagtgattgtgaatctagttgggctgcttgtgcagagtgtgttttactatgtttgtaagagttttcatcatcagccgattgataaatctgcgttgcacgatcatcttggtggatatcttggtgactatgtgccgttaaagagcagtattcagatggagaactttgatatttaa

SEQ ID NO: 32 - protein, 321 aa, Arabidopsis thaliana
MDLAAEELQFLNIQGILRESTTIPKFSPKTFYLITLTLIFPLSFAILAHSLFTQPILAQLDATPPSDQSKTNHEWTLLLIYQFIYVIFLFAFSLLSTAAVVFTVASLYTGKPVSFSSTMSAIPLVLKRLFITFLWVSLMMLVYNSVFLLFLVVLIVAIDLQSVILAVFSMVVIFVLFLGVHVYMTAWWHLASVVSVLEPIYGIAAMKKSYELLNGRTNMACSMVFMYLALCGITAGVFGGVVVHGGDDFGLFTKIVVGGFLVGILVIVNLVGLLVQSVFYYVCKSFHHQPIDKSALHDHLGGYLGDYVPLKSSIQMENFDI

SEQ ID NO: 33 - DNA, 3513 bp, Arabidopsis thaliana
  CDS (1)..(3513)
atggcagcatcttccgaaatactcccggagtcgtggcaagtgttcatcaatttccgaggagcagatttgcgcaacggtttcatcagccatctggcgggagctttgacctcagctggaatcacatactacatcgacacggaagaagtcccgagcgaagatctcactgtccttttcaagaggatagaggaatcggaaatcgcactgtccatcttctcgagcaattatgctgagtcaaaatggtgtttggacgagctcgtgaagatcatggaacaagtaaagaaaggaaagctcagaatcatgcccgtcttcttcaacgtgaagccagaggaggtgagagagcagaacggagagttcggacttaagctttacggagaaggtaaaagcaaacgacccaacatacctaattgggagaacgctttgcggtctgtcccaagcaagataggcttgaatttggcgaattttagaaacgagaaggaactccttgacaagatcattgactccatcaaaaaagtacttgcccgaattacacgagcaagcagagtagcagaatctctaaacgggatctcaaaagactcagaggcaaagaatgtagacacattttcgccaaactccagtgattttccatctacttccattgacgacgacctcagtatcaactcgcctcagtaccaagccacaattccccccgcaagcagggaaggtgaacgtctcaacacgatctctactgtaagttcaactggtagtattgaacatcctccacccaactacggaatagaaccacgccttaaggagatggaagaaaagttagattttgatagcctcgaaactaaaactgttggaattgttgggatgcctgggattggtaaaaccactcttgcagaaacgttgtatagaaagtgggaacacaagtttgagaggagtatgtttttcccagatgccagtaagatggcgaatgaacacggaatgtgttggctgcagaagagattattggaagagctgttgaaggatactaatctcaacataggatatacaacgaatgaacatgagttttgtaaggatgttcttctcctaaagaaagtttttcttgtcatagataatgttagtagcgaggaacagatcgaaactctttttggtaaatggaattggattaaaaatggaagcaagattgttattacgtcaagtgatgagtcaatgctcaagggtttcgttaaagatacttatgtagtcccaagtttgaacagcagagacagtctactgtggtttactaatcatgcatttggtttggatgatgcccagggaaacttggtaaagttgtccaaacactttctgaattatgccaaaggcaacccactagccctcggagcttttggtgtagaactttgtgggaaagacaaggctgattgggaaaagagaataaaaacattgacactaatttccaataagatgatccaagatgtcttgagaagaaggtatgatgaactcacagagaggcagaaagatatttttcttgacgtcgcatgtttcttcaaatcagagaatgaaagttatgtacgacacgtggtgaattcatgtgattctgagtctactaagagttgggatgaaataacagatctcaaaggaaagtttcttgtcaatatttctggtggtcgagttgagatgcatgatatactatgcacattcgccaaggaacttgcttcacaagcattgactgaagatacaagggttcatctcaggctgtggaactatcaagatatcatgtggtttctcaacaatgaattggaaatggaaaatgtcagaggtattttcttagacatgtctaaagttccggaggaaatgacatttgatggtaacatctttagcaatatgtgcaatcttcgatatctcaaaatatacagttctgtttgccataaggaaggcgaaggtatcttcaaatttgacacagttagggaaattcagttaccattagacaaggtacgctatctccactggatgaaatatccatgggagaaacttccatcagacttcaacccggagaatctcgttgatcttgaactgccttatagctccattaagaaagtttgggagggtgttaaggataccccgatactaaagtgggccaatctaagctattcaagtaagttgactaaccttttagggttgtcaaatgctaaaaatcttgaaagattgaatcttgaaggttgcacaagtttgcttaaactgccccaagagatggagaacatgaaaagtcttgtcttcctgaacatgagacgttgcactagtctcacatgtcttcaaagtattaaagtgagctctctgaaaattctcatactcagtgactgctcaaaacttgaggaatttgaggtgatttcggaaaatctggaagaattatatttagatggaactgcaataaagggacttcctccagcggccggggatctgacgagacttgtcgtcttaaatatggaaggctgtacagaactggagagtcttcccaaacgtcttggaaaacagaaagctcttcaagaactggtactctctggatgttcaaagctcgagagcgttccaacggacgtaaaagacatgaaacatctacggctcttattgcttgacggcacaagaatcagaaagatcccgaagataaagtcgctaaagtgtttgtgcttaagtagaaatattgcaatggtcaatctacaagataatctcaaagatttctctaatctgaaatgtcttgtcatgaagaactgcgagaatctcagatatcttccttcgcttccaaaatgtcttgagtacctaaacgtatatggttgtgaaagactagaatcagttgagaatccactggttgctgataggttaacgttattccttgatagatctgaggaattacgttccactttcttgttcactaattgccacaatctgtttcaagatgcaaaggactcaatctcaacctacgcgaaatggaaatgccaccgacttgcagttgaatgctacgaacaggacatagtttctggagcttttttcaacacttgctatcctggatatatagtcccttcgtggttcgatcaccaagcagttggatcagtcttagagccaaggctggaaccacattggtataacactatgctttctgggatagctctatgtgcagttgtatcattccatgagaaccaagatccgatcatcggcagtttctcagtaaaatgcacattgcaatttgaaaacgaagatgggtctcttcgctttgattgtgatatcggatgtttgaacgaaccaggaatgattgaggcagaccatgtttttatcggctatgtcacttgctcacgtttgaaagatcaccactctatacctattcatcaccctacaactgtaaaaatgcagttccacttgactgatgcttgtaaaagtaaagtggtggattgtgggttccgtttgatgtacacccagagccgtggctgtttgttagaggaagaagtcaacgccaacttcactaaattatacttgggtttattgtaa

SEQ ID NO: 34 - protein, 1170 aa, Arabidopsis thaliana
MAASSEILPESWQVFINFRGADLRNGFISHLAGALTSAGITYYIDTEEVPSEDLTVLFKRIEESEIALSIFSSNYAESKWCLDELVKIMEQVKKGKLRIMPVFFNVKPEEVREQNGEFGLKLYGEGKSKRPNIPNWENALRSVPSKIGLNLANFRNEKELLDKIIDSIKKVLARITRASRVAESLNGISKDSEAKNVDTFSPNSSDFPSTSIDDDLSINSPQYQATIPPASREGERLNTISTVSSTGSIEHPPPNYGIEPRLKEMEEKLDFDSLETKTVGIVGMPGIGKTTLAETLYRKWEHKFERSMFFPDASKMANEHGMCWLQKRLLEELLKDTNLNIGYTTNEHEFCKDVLLLKKVFLVIDNVSSEEQIETLFGKWNWIKNGSKIVITSSDESMLKGFVKDTYVVPSLNSRDSLLWFTNHAFGLDDAQGNLVKLSKHFLNYAKGNPLALGAFGVELCGKDKADWEKRIKTLTLISNKMIQDVLRRRYDELTERQKDIFLDVACFFKSENESYVRHVVNSCDSESTKSWDEITDLKGKFLVNISGGRVEMHDILCTFAKELASQALTEDTRVHLRLWNYQDIMWFLNNELEMENVRGIFLDMSKVPEEMTFDGNIFSNMCNLRYLKIYSSVCHKEGEGIFKFDTVREIQLPLDKVRYLHWMKYPWEKLPSDFNPENLVDLELPYSSIKKVWEGVKDTPILKWANLSYSSKLTNLLGLSNAKNLERLNLEGCTSLLKLPQEMENMKSLVFLNMRRCTSLTCLQSIKVSSLKILILSDCSKLEEFEVISENLEELYLDGTAIKGLPPAAGDLTRLVVLNMEGCTELESLPKRLGKQKALQELVLSGCSKLESVPTDVKDMKHLRLLLLDGTRIRKIPKIKSLKCLCLSRNIAMVNLQDNLKDFSNLKCLVMKNCENLRYLPSLPKCLEYLNVYGCERLESVENPLVADRLTLFLDRSEELRSTFLFTNCHNLFQDAKDSISTYAKWKCHRLAVECYEQDIVSGAFFNTCYPGYIVPSWFDHQAVGSVLEPRLEPHWYNTMLSGIALCAVVSFHENQDPIIGSFSVKCTLQFENEDGSLRFDCDIGCLNEPGMIEADHVFIGYVTCSRLKDHHSIPIHHPTTVKMQFHLTDACKSKVVDCGFRLMYTQSRGCLLEEEVNANFTKLYLGLL

SEQ ID NO: 35 - DNA, 780 bp, Arabidopsis thaliana
  CDS (1)..(780)
atggaccggaggctcaagaaatgctcgacatccaccgatgttgaatcagttcatgatgttagtaaggtcacggatcctttgcagaaagctaagagagagttggataatgtggaaatcaaagaaaaacagaagaagcagaagaaccaaaatgaaacatctgagaaggaaactaaaaaattcagcaccgtttacgaaaagtttaatgatactattaaagaactagacagggtttctggaacatgtcccatacgacctgccattccattcacgcccccaaaggaaaaggtggaaccgatatatcacaatgagtgcaatttcgatgataaagctcatctgggagtatctgacagcgccctttttgtacaaggatttgatacttcccatccaaggcatgaaatcaagacagcattgtggaatcatttctcttcatgtggtaaggtctatctgatttatgttcccattgcgtgttctaccggtgcttcggtgggatatgctttcattgatatgaaaaatgaaaccaaggggttgacactcaatggaagtcatttgggaggacggaagatcgatgttatgttcgccatagatagagaagagttttacttctcttctaacttaaaacactgtcaacgctgccgtaattataggccatggcttgttttaaaagccatgtcagatgcctgctttgaatatcaccagaggattaaaccgcggatcgttggcactccccatagcaagattggtcgttttacagccattattggtcgtcgctcttacagctag

SEQ ID NO: 36 - protein, 259 aa, Arabidopsis thaliana
MDRRLKKCSTSTDVESVHDVSKVTDPLQKAKRELDNVEIKEKQKKQKNQNETSEKETKKFSTVYEKFNDTIKELDRVSGTCPIRPAIPFTPPKEKVEPIYHNECNFDDKAHLGVSDSALFVQGFDTSHPRHEIKTALWNHFSSCGKVYLIYVPIACSTGASVGYAFIDMKNETKGLTLNGSHLGGRKIDVMFAIDREEFYFSSNLKHCQRCRNYRPWLVLKAMSDACFEYHQRIKPRIVGTPHSKIGRFTAIIGRRSYS

SEQ ID NO: 37 - DNA, 1392 bp, Arabidopsis thaliana
  CDS (1)..(1392)
atgatctgttcaagtaaaggaacaatcttaatcgctagaggtaaaaattcaaatacaatccctagattacccctaaaagggtcatccacaaattacgcgaatcgaattcaaattcgaaacccaatcagtgtcaaaactttccggcgatcatcttcatcgtcaatggcggtggaaacaatgtcgatgggatcagattcatcaactttgattctaacatcaggagcaagcggtcgcgttagggtactcttctcgatgcgagagcttaagcgtctcgttacgattatccaatcgttgattcttttcctcctccttccgtttcgcgtcgtcgtttggcggcggaggactggtgcggtggttatcagagacgataagcaagagaggaaggtttggtctcctccgcagatcgtggtgaggaagaggaacatcggtggcgaaagcagcgtttctcctccgtcggttccagctgcggtggtggatggggaggttgctgttcgacgtgaactggcgattaagcgagttttggaggatgaaggcggcgatggaagctccgtcagagattattcgctattcacgacgaagagaggagatacgttgtttagtcagtcatggtcacctctttccccaaatcacaggggacttattgttctgctacatggattaaacgagcatagtggcaggtatagtgattttgcaaagcagcttaatgctaatgggttcaaggtctatggaattgactggatcggtcatggcggaagtgatggacttcatgcttacgttccttcccttgattacgctgtcacagatttgaaatcatttcttgaaaaggtattcacagagaatccaggactcccctgtttctgctttggacactcaacaggtggagcaatcatcctcaaggctatgctggatccaaagattgaatctcgagtttcaggcattgcattgacttcaccagctgttggagtccaaccatcccatccaatcttcgctgttcttgctccaatcatggcgtttctactacccaggtaccaaatcagtgcagcaaacaagaaaggaatgccggtttctcgtgacccagcagctctcatcgccaaatactctgacccattagtcttcaccggatccatccgggttaaaaccggctacgagatccttagaatcactgctcacttgcaacagaacctgaacaaagtgaaagttccctttcttgtgatgcacggtactgacgacacagttaccgatcctagcgcctcaaagaagctctacgaggaagctgcctcgtcagacaaatcactcaagctctacgacgggttgttgcacgatcttctttttgaacccgaacgagaaatcatcgctggagccatattagattggctaaaccagcgggtttag

SEQ ID NO: 38 - protein, 463 aa, Arabidopsis thaliana
MICSSKGTILIARGKNSNTIPRLPLKGSSTNYANRIQIRNPISVKTFRRSSSSSMAVETMSMGSDSSTLILTSGASGRVRVLFSMRELKRLVTIIQSLILFLLLPFRVVVWRRRTGAVVIRDDKQERKVWSPPQIVVRKRNIGGESSVSPPSVPAAVVDGEVAVRRELAIKRVLEDEGGDGSSVRDYSLFTTKRGDTLFSQSWSPLSPNHRGLIVLLHGLNEHSGRYSDFAKQLNANGFKVYGIDWIGHGGSDGLHAYVPSLDYAVTDLKSFLEKVFTENPGLPCFCFGHSTGGAIILKAMLDPKIESRVSGIALTSPAVGVQPSHPIFAVLAPIMAFLLPRYQISAANKKGMPVSRDPAALIAKYSDPLVFTGSIRVKTGYEILRITAHLQQNLNKVKVPFLVMHGTDDTVTDPSASKKLYEEAASSDKSLKLYDGLLHDLLFEPEREIIAGAILDWLNQRV

SEQ ID NO: 39 - DNA, 1401 bp, Arabidopsis thaliana
  CDS (1)..(1401)
atgactgaagttcttcactttccttcatctccaagcgcttctcattcatcttcttcttcttcttcttctccttcaccttcttctttatcttacgcctctcgctctaatgcgactctcttgattagctctgaccacaaccggagaaacccagttgctagattcgatcaagatgttgactttcatgcctcaatcgaagaacaagatttgagaagacggagcagtaccgatggaggagaagaagacgatggtggggaagatcagatttcgttgttggctcttcttgttgccattttcaggagatctttgatttcttgcaagagtaaccggagggagctttgtagcatggagattggatggcctaccaatgtcagacacgtggcgcacgttacctttgatcgtttcaatggcttcttgggtttgcctgttgaattcgagcctgaagttcctagaagagctccaagcgccagtgcaacagtctttggggtatcaaccgaatcaatgcaattatcgtatgattcaagaggcaattgtgtaccaaccatactattgctgatgcaaaactgtttatatagtcaaggaggcttgcaggcagagggcatttttagactcactgctgagaatagtgaggaagaggcggttagggaacaattaaaccgaggatttatacctgagcgaatcgatgttcactgtttggcagggcttatcaaggcatggtttagagaactgccgacaagcgttcttgattcgttgtcgcctgaacaggtgatgcagtgccaaacagaagaggaaaatgttgagctcgttaggcttcttccacctacagaagctgctctacttgattgggccatcaatctaatggcagatgttgttcagtatgaacatctaaacaagatgaattcacgcaacatcgctatggttttcgcaccaaatatgacacagatggatgatccactgacagcactgatgtatgcggttcaagtgatgaactttctcaagacactaatcgaaaaaactttaagagaaaggcaagactcagtggtcgagcaagctcatgcattccctttagaaccgtctgatgagagtggtcaccaaagcccttcacaatctttggcttttaacaccagtgagcagagtgaagagacgcaatcagacaacatcgaaaatgctgaaaatcagagttcaagcagtgagatatcagacgaattaaccctagagaacaatgcatgtgaacagagagaaacagactttggaaaatacagaacaggaagattgagcgactcgagtcaacaggtggtgctgaatctagatcctccagctcagtggccagtgggcagaacaaaggggttgaccaacttgagccgtgtaggatcgagggtagagcgtactgaagcttggcggtga

SEQ ID NO: 40 - protein, 466 aa, Arabidopsis thaliana
MTEVLHFPSSPSASHSSSSSSSSPSPSSLSYASRSNATLLISSDHNRRNPVARFDQDVDFHASIEEQDLRRRSSTDGGEEDDGGEDQISLLALLVAIFRRSLISCKSNRRELCSMEIGWPTNVRHVAHVTFDRFNGFLGLPVEFEPEVPRRAPSASATVFGVSTESMQLSYDSRGNCVPTILLLMQNCLYSQGGLQAEGIFRLTAENSEEEAVREQLNRGFIPERIDVHCLAGLIKAWFRELPTSVLDSLSPEQVMQCQTEEENVELVRLLPPTEAALLDWAINLMADVVQYEHLNKMNSRNIAMVFAPNMTQMDDPLTALMYAVQVMNFLKTLIEKTLRERQDSVVEQAHAFPLEPSDESGHQSPSQSLAFNTSEQSEETQSDNIENAENQSSSSEISDELTLENNACEQRETDFGKYRTGRLSDSSQQVVLNLDPPAQWPVGRTKGLTNLSRVGSRVERTEAWR

SEQ ID NO: 41 - DNA, 519 bp, Arabidopsis thaliana
  CDS (1)..(519)
atggcgaatcaagcagctgctgcagcattcttccttttcgctttagccgtcttctccaacttggagctctcagcttcttcacttgtcagtggcaagatctcttgccttgactgccaccgcgatttcgacttctcaggcattaaggtcctccttaaatgcgacggagagaagaaacaaataaccgcggtggcagctgcagacggatctttccggtcagtgcttccaacggctgacaaaaaaggctccataaattgtcttgcaaagctcttgggaggccctgagcaactctatgctcacaaacacaacttggtctctgaattggtcaaatctaaacacgattccaaagttttaactacctcaaacccacttgccttctctctctcctgccccaaaccatcccgagatgatatcggaagtatgatcggagattccaagactattaattttccgggggcaggaggttttggattcccacctgccagcttctttcccttcttaccaatcattggtatcccatga

SEQ ID NO: 42 - protein, 172 aa, Arabidopsis thaliana
MANQAAAAAFFLFALAVFSNLELSASSLVSGKISCLDCHRDFDFSGIKVLLKCDGEKKQITAVAAADGSFRSVLPTADKKGSINCLAKLLGGPEQLYAHKHNLVSELVKSKHDSKVLTTSNPLAFSLSCPKPSRDDIGSMIGDSKTINFPGAGGFGFPPASFFPFLPIIGIP

SEQ ID NO: 43 - DNA, 954 bp, Arabidopsis thaliana
  CDS (1)..(954)
atgaaaagtggagggaacacaaacactaaactcatacttgttcatccatacattcaaaagcaaacaagcacaaatcgtctatggcttctcgctttcgtttctttcttcacaatcgcttttctcctaactcttctctacaccaccgactccatcatctcttctaaaaacaactccgccaccgtctcctccgccgtcaattctgccgtcaccaccgctaccatctctcagttaccaacaacagccatcaatgcaatgcttcactacgcttcaagatcaaacgacagctaccacatgtcatacggagagatgaaatcaatctccgacgtcctccgccgctgctctccgccgtgtaatctcttagtcttcggtcttacacacgaaacccttctctggaaatcgctaaaccacaacgggcgtacagttttcatcgaagagaatcgttactacgctgcttacttcgaagaaatccacccggagatcgaagtcttcgatgttcagtacacgaccaaagctcgtgaggcgcgtgagcttgtgtcggcggttaaagaagcggcgaggaacgagtgtcgtccagtgcagaatcttctcttttcagattgtaaattaggactcaatgatttgccgaatcatgtatacgatgttgattgggatgtgatcttagttgatggaccacgtggcgacggtggagatgtaccggggaggatgtcgtcgattttcacggcggcggttcttgctcggagtaaaaaaggcgggaatccgaagacgcatgtgtttgttcatgattattacagagatgttgagagactttgtggggatgagtttctttgccgggagaatcttgtggaatctaatgatctgcttgcgcactacgtgttggagaagatggataaaaacagcacgcagttctgtcgtggtcgtaagaagaaacgctctgtttcttctccatcggcttga

SEQ ID NO: 44 - protein, 317 aa, Arabidopsis thaliana
MKSGGNTNTKLILVHPYIQKQTSTNRLWLLAFVSFFTIAFLLTLLYTTDSIISSKNNSATVSSAVNSAVTTATISQLPTTAINAMLHYASRSNDSYHMSYGEMKSISDVLRRCSPPCNLLVFGLTHETLLWKSLNHNGRTVFIEENRYYAAYFEEIHPEIEVFDVQYTTKAREARELVSAVKEAARNECRPVQNLLFSDCKLGLNDLPNHVYDVDWDVILVDGPRGDGGDVPGRMSSIFTAAVLARSKKGGNPKTHVFVHDYYRDVERLCGDEFLCRENLVESNDLLAHYVLEKMDKNSTQFCRGRKKKRSVSSPSA

SEQ ID NO: 45 - DNA, 1272 bp, Arabidopsis thaliana
  CDS (1)..(1272)
atgaaactaaatctctcgaatctcagatttctacgtacccgaaaatcgttaatctcccagacgcgagcaatgactcaaaatccggatccaaaacctgatccatcgcaggttctagacgatatcctctgttcggagcagcgtgatgggcagattgaggaaacagtcgacacagcgccggcgagcttgggctctccaagtcgggtcttaagcattgatactagagtagagagagcttgggcacactggaaaaaactgggtagacccaagtatatcgttgctccaatggttgataactctgagcttccgtttagattgctctgccagaaatacggagctcaggctgcttatactccgatgttgcattctaggatcttcaccgagactgagaagtatagaaatcaggagttcaccacctgtaaggaggacaggccattgtttgtgcagttctgtgctaatgatcctgatacgttattggaagctgcaaagagagtcgaaccttactgcgactatgttgatatcaatttagggtgtcctcagcgtatagcgaggcgaggaaattatggtgcattcttgatggataatcttcctttggtgaaatcacttgttgaaaagttagctcagaacctcaatgttcctgtctcctgtaaaatccggatcttcccgaacctggaagatacactcaagtacgccaagatgctagaagatgctggttgctcgctcctagctgttcacgggcgaacaagagatgagaaagacgggaagaaatttagagctgattggagcgcaatcaaggaagtgaaaaacgctatgagaatccctgtcttagcgaatgggaatgtaagatgcatcgaagatgtcgataactgcatcaaagagacgggtgttgaaggtgttctctctgcggagacgcttcttgaaaacccggcggcctttgctgggtttagaacagctgaatgggcaaaagataacgaagaagagggattcgtcgatggagggttagaccagggagatttagttgttgagtatttaaagctgtgtgagaagcatccggttccatggaggatgattcgatctcacgttcataagatgttgggagaatggtttagaattcatccacaagttagagagcaacttaatgctcaaaacatattgacgtttgagtttctatacggacttgtggatcagctaagagagcttggaggaagagttccactctacaagaaaaagaagatagatactctgactccacaagactctccacaaagggtttag

SEQ ID NO: 46 - protein, 423 aa, Arabidopsis thaliana
MKLNLSNLRFLRTRKSLISQTRAMTQNPDPKPDPSQVLDDILCSEQRDGQIEETVDTAPASLGSPSRVLSIDTRVERAWAHWKKLGRPKYIVAPMVDNSELPFRLLCQKYGAQAAYTPMLHSRIFTETEKYRNQEFTTCKEDRPLFVQFCANDPDTLLEAAKRVEPYCDYVDINLGCPQRIARRGNYGAFLMDNLPLVKSLVEKLAQNLNVPVSCKIRIFPNLEDTLKYAKMLEDAGCSLLAVHGRTRDEKDGKKFRADWSAIKEVKNAMRIPVLANGNVRCIEDVDNCIKETGVEGVLSAETLLENPAAFAGFRTAEWAKDNEEEGFVDGGLDQGDLVVEYLKLCEKHPVPWRMIRSHVHKMLGEWFRIHPQVREQLNAQNILTFEFLYGLVDQLRELGGRVPLYKKKKIDTLTPQDSPQRV

SEQ ID NO: 47 - DNA, 777 bp, Arabidopsis thaliana
  CDS (1)..(777)
atggcgatggcggtctccggagctgtcctcagtgggcttggttcttcgttcctcaccggaggcaagagaggtgccaccgcattggcaagcggcgtaggcactggagctcagagagttggcaggaaaactcttattgtcgctgctgcggctgctcagcctaagaaatcttggatccctgccgttaaaggtggtggcaacttccttgaccctgaatggctcgatggctcgctaccaggagatttcgggttcgacccattgggtttggggaaagacccggcttttctgaaatggtacagagaggctgagctgatccatggccgatgggcgatggcagcggttcttgggatcttcgtcggccaggcctggagcggtgtggcatggtttgaagctggagcccagccagacgcgatcgctcccttctcgttcgggtcgcttcttggaacccaattgcttctcatgggttgggtggagagcaaacgatgggtcgatttcttcaacccggattctcaatcggttgagtgggcaacgccatggtcgaagaccgccgagaatttcgcgaactataccggcgatcagggataccccggtgggagattcttcgatccgttgggtctcgccgggaaaaaccgcgacggtgtttatgagccggactttgagaagctggagaggctgaaattggcagagattaagcactcgaggctcgcaatggttgccatgttgatcttttactttgaggccgggcaggggaaaacgcctctcggtgctcttggtttgtga

SEQ ID NO: 48 - protein, 258 aa, Arabidopsis thaliana
MAMAVSGAVLSGLGSSFLTGGKRGATALASGVGTGAQRVGRKTLIVAAAAAQPKKSWIPAVKGGGNFLDPEWLDGSLPGDFGFDPLGLGKDPAFLKWYREAELIHGRWAMAAVLGIFVGQAWSGVAWFEAGAQPDAIAPFSFGSLLGTQLLLMGWVESKRWVDFFNPDSQSVEWATPWSKTAENFANYTGDQGYPGGRFFDPLGLAGKNRDGVYEPDFEKLERLKLAEIKHSRLAMVAMLIFYFEAGQGKTPLGALGL

SEQ ID NO: 49 - DNA, 381 bp, Arabidopsis thaliana
  CDS (1)..(381)
atgcctccaccggttcaagatttcccgccaattctcactccaccggctgaagagttcccgccgattttgcctccaccggttcaagagatcccgccggttttcacattaccaccgaccgtacaagatccaccgacaattccagtattctccacaccaccagtcctcggagatttcccaccccaaactcccgactttaccacgccgccagaggtcacaaatccatggcaaccgccggtgacgtcattcgcaccaccaatagagtccatcccaacaataccggataatccgtttccggttacaccaaacccggacatgggttcaaatcaaccgtttgttgagcttcctccgcctacttgggattccccgccatttaatcgttaa

SEQ ID NO: 50 - protein, 126 aa, Arabidopsis thaliana
MPPPVQDFPPILTPPAEEFPPILPPPVQEIPPVFTLPPTVQDPPTIPVFSTPPVLGDFPPQTPDFTTPPEVTNPWQPPVTSFAPPIESIPTIPDNPFPVTPNPDMGSNQPFVELPPPTWDSPPFNR

SEQ ID NO: 51 - DNA, 879 bp, Arabidopsis thaliana
  CDS (1)..(879)
atgagtatggagatggagttgtttgtcactccagagaagcagaggcaacatccttcagtgagcgttgagaaaactccagtgagaaggaaattgattgttgatgatgattctgaaattggatcagagaagaaagggcaatcaagaacttctggaggcgggcttcgtcaattcagtgttatggtttgtcagaagttggaagccaagaagataactacttacaaggaggttgcagacgaaattatttcagattttgccacaattaagcaaaacgcagagaagcctttgaatgaaaatgagtacaatgagaagaacataaggcggagagtctacgatgcgctcaatgtgttcatggcgttggatattattgcaagggataaaaaggaaatccggtggaaaggacttcctattacctgcaaaaaggatgtggaagaagtcaagatggatcgtaataaagttatgagcagtgtgcaaaagaaggctgcttttcttaaagagttgagagaaaaggtctcaagtcttgagagtcttatgtcgagaaatcaagagatggttgtgaagactcaaggcccagcagaaggatttaccttaccattcattctacttgagacaaaccctcacgcagtagtcgaaatcgagatttctgaagatatgcaacttgtacacctcgacttcaatagcacacctttctcggtccatgatgatgcttacattttgaaactgatgcaagaacagaagcaagaacagaacagagtatcttcttcttcatctacacatcaccaatctcaacatagctccgctcattcttcatccagttcttgcattgcttctggaacctcaggcccggtttgctggaactcgggatccattgatactcgctga

SEQ ID NO: 52 - protein, 292 aa, Arabidopsis thaliana
MSMEMELFVTPEKQRQHPSVSVEKTPVRRKLIVDDDSEIGSEKKGQSRTSGGGLRQFSVMVCQKLEAKKITTYKEVADEIISDFATIKQNAEKPLNENEYNEKNIRRRVYDALNVFMALDIIARDKKEIRWKGLPITCKKDVEEVKMDRNKVMSSVQKKAAFLKELREKVSSLESLMSRNQEMVVKTQGPAEGFTLPFILLETNPHAVVEIEISEDMQLVHLDFNSTPFSVHDDAYILKLMQEQKQEQNRVSSSSSTHHQSQHSSAHSSSSSCIASGTSGPVCWNSGSIDTR

SEQ ID NO: 53 - DNA, 1527 bp, Arabidopsis thaliana
  CDS (1)..(1527)
atgaaaggttcaattcttactgttttgtcaatggagaatcatcatccgtcaacgcttttatctatggattctagtggctcatctcatgaagagcttgatttggagatgaacaatggtaataggcaaatcactctttataatccaccagacattaatctgcctttgtctgtaggaagaagctctccttcttggaatttggattcttgtgataacattttggatgttggtcttagctctcatgtctatgagaccgagacgtttctcaatgtggtcccgagtaaagtagctaagaagtgtttgaaacgaggggatagtatgtggggagcttggtttttctttagcttctacttcagaccggcgttgaatgagaaatccaagtctaaggtcattagggaaagtggtggtggtggaggaggaggaggaggatgttttactgggtttgataaatctgatctcaagctcgatgtttttcttgttcagcatgatatggagaacatgtatatgtgggcttttaaggataaacctgagaatgcgcttgggaaaatgcagttgagaagctatatgaatgggcattctcgtcaaggtgagcgtccgtttccgtttagtgcggagaaagggtttgttcggtctcacagaatgcagaggaagcattacaggggactctctaatcctcagtgtcttcacgggattgagtttgtggcttcgccgagtttgtttggtgtcggtgaagaagataagaagagatggatggagctcacgggtcgagatttgaagttcactatccctcctgatgctagtgatttcggttcatggagaaatcttcccaacacagacatcgagctagagagaccagctcatgttactaaagcagcaccgaataacgccaagaagattctcaatggctccggcttacatttgacaagcaatgcgtctttcagtagcaatggggactcgtctgatcaatctccaggaggaggagtcatcaacaacaagaagagaaaagagtttctatctcctggaagcagcgaagaagaatgctgtttgactgttaacaacatcgagacccaccacgccaaggacccgcccagttgggtaaacgacttcacgggagtgatgaagaatagctgcggacctgtaactgctgcaaaaaccgtctatgaggacgaagaagcttatctggtcgtaataactctaccatttgtggatttgaacaccgtgaaggtttcatggaggaacaatatcacaaatggaatcgtgaaggtcacgggactaagcacttcgagggcttcgtttgtgaagagacgggaccggactttcaagctggttgatcagatggctgagcattgtcctccaggggaattcatgagggagatacaattgccgaatcggattccggaagaagcaaatattgaagcatactttgatgggactggaccagttttagagattgtggttccaaaattgagaggaggagtggaggaagaacacgaggttagagtttgtctacggtcacaccacctcggatga

SEQ ID NO: 54 - protein, 508 aa, Arabidopsis thaliana
MKGSILTVLSMENHHPSTLLSMDSSGSSHEELDLEMNNGNRQITLYNPPDINLPLSVGRSSPSWNLDSCDNILDVGLSSHVYETETFLNVVPSKVAKKCLKRGDSMWGAWFFFSFYFRPALNEKSKSKVIRESGGGGGGGGGCFTGFDKSDLKLDVFLVQHDMENMYMWAFKDKPENALGKMQLRSYMNGHSRQGERPFPFSAEKGFVRSHRMQRKHYRGLSNPQCLHGIEFVASPSLFGVGEEDKKRWMELTGRDLKFTIPPDASDFGSWRNLPNTDIELERPAHVTKAAPNNAKKILNGSGLHLTSNASFSSNGDSSDQSPGGGVINNKKRKEFLSPGSSEEECCLTVNNIETHHAKDPPSWVNDFTGVMKNSCGPVTAAKTVYEDEEAYLVVITLPFVDLNTVKVSWRNNITNGIVKVTGLSTSRASFVKRRDRTFKLVDQMAEHCPPGEFMREIQLPNRIPEEANIEAYFDGTGPVLEIVVPKLRGGVEEEHEVRVCLRSHHLG

SEQ ID NO: 55 - DNA, 747 bp, Arabidopsis thaliana
  CDS (1)..(747)
atgcatttctcttcgtcttcaacatcgtccacttggacaatcttaatcacattgggatgtcttatgcttcatgcatctttgtccgctgctcaactcacccctaccttctacgataggtcatgtcctaatgtcactaacatcgtacgagaaaccattgtaaatgagttaaggtcggaccctcgtatcgctgcgagcatccttcgtcttcacttccacgactgctttgttaatggttgtgacgcatccatcttgttagacaacacgacatcatttcgaacagagaaagatgcgtttggaaacgcaaattcggctcggggatttccagtgattgatagaatgaaagctgcggtggagagggcatgcccaagaaccgtttcatgcgcagatatgctcaccattgcagctcaacaatctgtcactttggcaggaggtccttcttggagggttcctttgggaaggagagacagtttacaagcattcctggaactcgctaatgcaaatcttccagctccattctttacacttcacaacttaaagccagcttcagaaatgttggtctcgatcgtccttctgatctcgttgctctctccggtggtcacacatttggtaaaaatcaatgtcagtttattcttgacagattatacaatttcagcaacacaggtttacccgaccctacactcaacactacttacctccaaactcttcgtggactatgcccccttaatggcaatcgaagtgccttggtag

SEQ ID NO: 56 - protein, 248 aa, Arabidopsis thaliana
MHFSSSSTSSTWTILITLGCLMLHASLSAAQLTPTFYDRSCPNVTNIVRETIVNELRSDPRIAASILRLHFHDCFVNGCDASILLDNTTSFRTEKDAFGNANSARGFPVIDRMKAAVERACPRTVSCADMLTIAAQQSVTLAGGPSWRVPLGRRDSLQAFLELANANLPAPFFTLHNLKPASEMLVSIVLLISLLSPVVTHLVKINVSLFLTDYTISATQVYPTLHSTLLTSKLFVDYAPLMAIEVPW

SEQ ID NO: 57 - DNA, 1065 bp, Arabidopsis thaliana
  CDS (1)..(1065)
atgcaattctcttcatcttctattacttctttcacttggacagttttaatcacagtgggatgtcttatgctttgtgcgtctttctccgatgctcaacttacccctactttttacgacacttcatgtcctaccgtcaccaacattgtaagagataccattgtcaacgagctaagatcggaccctcgtatcgccgggagcatccttcgtcttcacttccatgactgctttgttaatggttgtgatgcttcgatcttgttagacaacacgacatcatttcgaacagagaaagatgcacttggaaatgcaaattcagcccgaggatttccagtgattgatagaatgaaagctgcggtggagagggcatgcccaagaaccgtttcatgcgcagatatgctcaccattgctgctcaacaatctgtcactttggcaggaggtccttcttggaaggttcctttagggagaagagacagcttacaagcatttctagatcttgctaacgcaaatcttccagctccattcttcacacttccacagcttaaagccaacttcaaaaatgttggcctcgatcgtccttctgatcttgttgcgctctccggggctcacacatttggtaaaaatcaatgtcgattcattatggacagattatacaactttagcaacactggattacctgaccctacactcaacactacttacctccaaactcttcgtggtcaatgtcctcgcaatggtaatcaaagcgtcttagtggatttcgatctgcgtacgcctttggttttcgacaacaaatactatgtgaatcttaaagagcaaaaaggtcttatccagagcgaccaagagttgttctctagccccaatgccactgacacaatccccttggtgagagcatatgctgatggcacacaaacattcttcaatgcattcgtggaggcaatgaataggatgggaaatattacaccaactacaggaactcaaggacaaatcaggttgaattgtagagtggtgaactccaactctctactccatgatgtggtggatatcgttgactttgtaagttctatgtga

SEQ ID NO: 58 - protein, 354 aa, Arabidopsis thaliana
MQFSSSSITSFTWTVLITVGCLMLCASFSDAQLTPTFYDTSCPTVTNIVRDTIVNELRSDPRIAGSILRLHFHDCFVNGCDASILLDNTTSFRTEKDALGNANSARGFPVIDRMKAAVERACPRTVSCADMLTIAAQQSVTLAGGPSWKVPLGRRDSLQAFLDLANANLPAPFFTLPQLKANFKNVGLDRPSDLVALSGAHTFGKNQCRFIMDRLYNFSNTGLPDPTLNTTYLQTLRGQCPRNGNQSVLVDFDLRTPLVFDNKYYVNLKEQKGLIQSDQELFSSPNATDTIPLVRAYADGTQTFFNAFVEAMNRMGNITPTTGTQGQIRLNCRVVNSNSLLHDVVDIVDFVSSM

SEQ ID NO: 59 - DNA, 1899 bp, Arabidopsis thaliana
  CDS (1)..(1899)
atggcggacgaatctcaatactcatcggatacttactccaacaaacgcaaatacgaagaaccaaccgctcctcctccatcaactcgcagacctaccggcttctcttctggtccgatcccatctgcttcagttgatcccaccgcacctaccggtcttccaccttcttcttacaacagcgttcctcctccgatggatgaaatccagattgctaaacaaaaagcacaagaaatcgctgctcgtcttcttaatagcgctgatgctaaacgtcctcgtgttgacaatggtgcttcttatgattatggtgacaacaaaggatttagctcatatccctctgagggtaagcagatgtcagggacggttccgtcttcgataccggtttcgtatggtagctttcaaggaactactaagaagattgatattccgaatatgagagttggtgttatcattggtaaaggtggagagactattaagtatcttcagcttcagtctggagctaagattcaggttactagagatatggatgcagaccctaattgtgctactaggactgttgacctaactggtacccctgatcagatctcaaaggctgaacagttgatcactgacgtccttcaagaggctgaggcaggcaatacagctggttcaggtggaggaggcggccgtaggatgggtggacaagcaggggctgatcaatttgttatgaaaattccgaataacaaggttggtttgataattggtaaaggaggtgaaacaatcaaatctatgcaagctaagactggagctagaattcaggttattcctttacatttgccccctggagacccaacgccagaacggactttgcagattgatgggataaccgaacagattgaacatgctaaacaattagttaatgaaatcatcagtggcgagaaccgtatgagaaactcagcaatgggtggaggctatccacaacaaggtggttatcaagcccgcccaccctcaagctgggcaccacctggtggtccgccagcacaacctggttatggtggttacatgcaaccaggagcatatccaggtccacctcagtatggtcaatcaccttacggaagttaccctcaacaaacttcagctggttactatgatcagtcctctgtgccaccatcccagcagagcgcgcaaggtgagtatgattattacggtcagcaacagtctcagcaaccaagcagtggtggtagctcagccccaccaacagataccacagggtacaattactaccagcatgcttctggttatggccaagctggtcagggataccagcaagatgggtatggagcttacaatgcctcgcagcaatcgggatatggtcaagctgctgggtatgatcaacagggtggttacggcagcaccactaatccaagtcaagaggaagatgcatctcaagccgctccaccatcgtcagctcagtctggacaggctgggtatggtacaactggtcaacagccgcctgctcaaggtagtactggtcaggcagggtatggagctcctccaacttctcaggctggttacagcagccagccagcagcagcttacaattctgggtatggagcaccaccacctgcttcaaagccaccgacttatggccagagccagcagtctccaggtgctcctgggagctatggtagtcagtctgggtatgcccaaccagcagcttcagggtatggacaacctccagcgtatgggtatggtcaagcgccacagggatatgggtcttatggaggatacacacaacctgctgctggtggaggttactcttcagacgggtctgctggagccactgctggtggtggtggtggtacaccagcttcacagagtgctgctccacctgctggaccgcccaaagcatccccgaaaagttga

SEQ ID NO: 60 - protein, 632 aa, Arabidopsis thaliana
MADESQYSSDTYSNKRKYEEPTAPPPSTRRPTGFSSGPIPSASVDPTAPTGLPPSSYNSVPPPMDEIQIAKQKAQEIAARLLNSADAKRPRVDNGASYDYGDNKGFSSYPSEGKQMSGTVPSSIPVSYGSFQGTTKKIDIPNMRVGVIIGKGGETIKYLQLQSGAKIQVTRDMDADPNCATRTVDLTGTPDQISKAEQLITDVLQEAEAGNTAGSGGGGGRRMGGQAGADQFVMKIPNNKVGLIIGKGGETIKSMQAKTGARIQVIPLHLPPGDPTPERTLQIDGITEQIEHAKQLVNEIISGENRMRNSAMGGGYPQQGGYQARPPSSWAPPGGPPAQPGYGGYMQPGAYPGPPQYGQSPYGSYPQQTSAGYYDQSSVPPSQQSAQGEYDYYGQQQSQQPSSGGSSAPPTDTTGYNYYQHASGYGQAGQGYQQDGYGAYNASQQSGYGQAAGYDQQGGYGSTTNPSQEEDASQAAPPSSAQSGQAGYGTTGQQPPAQGSTGQAGYGAPPTSQAGYSSQPAAAYNSGYGAPPPASKPPTYGQSQQSPGAPGSYGSQSGYAQPAASGYGQPPAYGYGQAPQGYGSYGGYTQPAAGGGYSSDGSAGATAGGGGGTPASQSAAPPAGPPKASPKS

SEQ ID NO: 61 - DNA, 465 bp, Arabidopsis thaliana
  CDS (1)..(465)
atggtgactccgattttctacgaggttgatcattctgatgttaggaaacagaccggagaatttggaaaggtctttgaagagacatgcaagaacaaaacagatgatgagaaacaaaggtgtaggaaagctctagcagatgtggcaaatatggctggagaggattctcgaaactggtgtaatgaagcaaacatgattgaaacaatttccaacgatgttccgaataagctcataacaccatcgagtgatttaggtgatttcgttggtgttgaagctcatttagagagattgagttcattgttgtgcttggaatctgaagaagctagaatggtagggattggtaagagtaccctaggaagagctcttttcagtcaactctctagccaattcccccttcgcgctttcgtaacttataaaccaaccgagaagaacaggttttatcagaaattttatgtcaaaaggacataa

SEQ ID NO: 62 - protein, 154 aa, Arabidopsis thaliana
MVTPIFYEVDHSDVRKQTGEFGKVFEETCKNKTDDEKQRCRKALADVANMAGEDSRNWCNEANMIETISNDVPNKLITPSSDLGDFVGVEAHLERLSSLLCLESEEARMVGIGKSTLGRALFSQLSSQFPLRAFVTYKPTEKNRFYQKFYVKRT

SEQ ID NO: 63 - DNA, 3312 bp, Arabidopsis thaliana
  CDS (1)..(3312)
atggctagccggagatacgacgttttcccaagcttcagtggggtagatgttcgcaaaacgttcctcagccatctaatcgaggcgctcgaccgcagatcaatcaatacattcatggatcacggcatcgtgagaagctgcataatcgccgatgagcttataacggccattagagaagcgaggatctcaatagttatcttctctgagaactatgcttcttccacgtggtgcttgaatgaattggtggagatccacaagtgtcacaaggacaaagacttggatcaaatggtgattccggttttctacggcgttgatccttctcatgttagaaaacagatcggtggctttggcgatgtctttaaaaagacatgcgaggacaaaccagaggatcagaaacaaagatgggttaaagctctcacagatatatcaaatttagccggggaggatcttcggaacgggcctagtgaagcagccatggttgtaaagatagctaatgatgtttcgaataaactttttcctctgccaaagggttttggtgacttagtcggaattgaggatcatatagaggcaataaaattaaaactgtgcttggaatccaaggaagctagaataatggtcgggatttggggacagtcagggattggtaagagtactataggaagagctcttttcagtcaactctctagccagttccaccatcgcgctttcataacttataaaagcaccagtggtagtgacgtctctggcatgaagttgagttgggaaaaagaacttctctcggaaatcttaggtcaaaaggacataaagatagagcattttggtgtggtggagcaaaggttgaagcacaagaaagttcttatccttcttgatgatgtggataatctagagtttcttaggaccttggtgggaaaagctgaatggtttggatctggaagcagaataattgtgatcactcaagataggcaacttctcaaggctcatgagattgaccttatatatgaggtgaagctcccatctcaaggtcttgctcttaagatgatatgccaatatgcttttgggaaatactctccacctgatgattttaaggaactagcatttgaagttgcaaagcttgccggtaatcttcctttgggtctcagtgtccttggttcgtctttaaaacgaaggagcaaagaagagtggatggagatgctggctgagctccaaaatggtttgaacagagatattatgaaaacattaagagtcagctacgttagattagatccaaaagatcaagatatattccattacattgcatggttattcaatggttggaaagtcaaatccatcaaagacttcctcggagatggtgttaatgttaacattaggctcaaaacgttggatgataagtccctcatacgtttaacaccgaatgatactatagagatgcacaatttgcttcagaagttggctacagaaattgatcgtgaagagtctaatggtaatcctggaaaacgtcgatttctggagaatgctgaggaaattctagacgtatttaccgataataccggcactgaaaaattgctcggaatagatttcagcacgtcatcagattcacaaatcgataagccatttatttcaatagatgaaaactcgttccaaggcatgcttaatctccaatttctaaatattcatgatcattactggtggcaaccgagagaaaccagattgcgtctacctaacggcctcgtttacttgccacgtaaactcaaatggctacggtgggaaaattgtccattgaagcgtttgccttctaattttaaggctgagtatctggttgaactcagaatggagaatagtgcccttgagaagctgtggaatggaactcagcctcttggaagtctcaagaagatgaatttgaggaattccaacaatttgaaagaaattccagatctttctttagccacaaacctcgaggaattagatctttgtaactgcgaagtgctagaaagttttccaagtcctctcaactcggaatctcttaagttcctcaatctcctactatgcccccggttgagaaatttccctgagattataatgcaaagtttcatctttacagatgaaattgagatcgaggtagcagattgtttatggaacaagaatctccctggactcgattatctcgattgccttaggagatgtaatccaagtaaatttcgcccagaacatctcaaaaacctcacagtgagaggcaacaacatgcttgagaagctatgggaaggcgtccagtcgcttgggaaactcaagagggtggatctgtcagaatgtgaaaacatgatagaaattccagacctttcaaaggccaccaatctggagattttggatctctcaaattgcaaaagtttggtgatgttaccttctacaattgggaatctccaaaaattatacacgttaaatatggaagaatgcacagggctgaaggttcttcctatggatatcaacttgtcatctctccatacagtccatctcaaagggtgctcaagtttgagatttatccctcagatttcaaaaagtattgcagtactcaatctagatgacactgccattgaagaagttccatgttttgagaatttctcgaggctcatggaattatcgatgcgtggttgcaagtcgttgagaagatttcctcagatttcaactagtattcaagaactcaatctagctgacaccgccattgaacaagttccctgcttcattgagaaattttcgaggctcaaggtactaaatatgagtggttgcaaaatgttgaaaaacatatccccgaacattttcagactgacaaggcttatgaaggtcgactttacagactgtggaggtgtcatcacagcgttgagtcttctatctaaattagacgtcaatgatgtggaatttaagtttaacgggacgagagtaaaaagatgcggcatacgactcttgaatgtgtctacatctccggatgatagtgagggaagctctgaaacagaatctccggatgatagtgatggagactctgtaacagagtaccaccaacagtctggagaaaaatgtgatgatgtagagactgaaagtagcaagaagcggatgcggatgacattaggaaactctgaaaaatatttcaacttaccctgtggccaaatagtaacagacactgttccgttagggtggggagaatcatcatcagtttcttttaatccatggctggagggggaagctttgtgtgttgattccatgattactgaacaacaagatgcacaaattcatatagctaatgtggattgggagtgggagttatggtaa

SEQ ID NO: 64 - protein, 1103 aa, Arabidopsis thaliana
MASRRYDVFPSFSGVDVRKTFLSHLIEALDRRSINTFMDHGIVRSCIIADELITAIREARISIVIFSENYASSTWCLNELVEIHKCHKDKDLDQMVIPVFYGVDPSHVRKQIGGFGDVFKKTCEDKPEDQKQRWVKALTDISNLAGEDLRNGPSEAAMVVKIANDVSNKLFPLPKGFGDLVGIEDHIEAIKLKLCLESKEARIMVGIWGQSGIGKSTIGRALFSQLSSQFHHRAFITYKSTSGSDVSGMKLSWEKELLSEILGQKDIKIEHFGVVEQRLKHKKVLILLDDVDNLEFLRTLVGKAEWFGSGSRIIVITQDRQLLKAHEIDLIYEVKLPSQGLALKMICQYAFGKYSPPDDFKELAFEVAKLAGNLPLGLSVLGSSLKRRSKEEWMEMLAELQNGLNRDIMKTLRVSYVRLDPKDQDIFHYIAWLFNGWKVKSIKDFLGDGVNVNIRLKTLDDKSLIRLTPNDTIEMHNLLQKLATEIDREESNGNPGKRRFLENAEEILDVFTDNTGTEKLLGIDFSTSSDSQIDKPFISIDENSFQGMLNLQFLNIHDHYWWQPRETRLRLPNGLVYLPRKLKWLRWENCPLKRLPSNFKAEYLVELRMENSALEKLWNGTQPLGSLKKMNLRNSNNLKEIPDLSLATNLEELDLCNCEVLESFPSPLNSESLKFLNLLLCPRLRNFPEIIMQSFIFTDEIEIEVADCLWNKNLPGLDYLDCLRRCNPSKFRPEHLKNLTVRGNNMLEKLWEGVQSLGKLKRVDLSECENMIEIPDLSKATNLEILDLSNCKSLVMLPSTIGNLQKLYTLNMEECTGLKVLPMDINLSSLHTVHLKGCSSLRFIPQISKSIAVLNLDDTAIEEVPCFENFSRLMELSMRGCKSLRRFPQISTSIQELNLADTAIEQVPCFIEKFSRLKVLNMSGCKMLKNISPNIFRLTRLMKVDFTDCGGVITALSLLSKLDVNDVEFKFNGTRVKRCGIRLLNVSTSPDDSEGSSETESPDDSDGDSVTEYHQQSGEKCDDVETESSKKRMRMTLGNSEKYFNLPCGQIVTDTVPLGWGESSSVSFNPWLEGEALCVDSMITEQQDAQIHIANVDWEWELW

SEQ ID NO: 65 - DNA, 1341 bp, Arabidopsis thaliana
  CDS (1)..(1341)
atggcgaacttggtcttatcagaatgtggtatacgacctctccccagaatctacacaacacccagatccaatttcctctccaacaacaacaaattcagaccatcactttcttcttcttcttacaaaacatcatcatctcctctgtcttttggtctgaattcacgagatgggttcacgaggaattgggcgttgaatgtgagcacaccattaacgacaccaatatttgaggagtctccattggaggaagataataaacagagattcgatccaggtgcgcctcctccgttcaatttagctgatattagagcagctatacctaagcattgttgggttaagaatccatggaagtctttgagttatgtcgtcagagacgtcgctatcgtctttgcattggctgctggagctgcttacctcaacaattggattgtttggcctctctattggctcgctcaaggaaccatgttttgggctctctttgttcttggtcatgactgtggacatggtagtttctcaaatgatccgaagttgaacagtgtggtcggtcatcttcttcattcctcaattctggtcccataccatggcaggagaattagtcacagaactcaccaccagaaccatggacatgttgagaatgacgaatcttggcatcctatgtctgagaaaatctacaatactttggacaagccgactagattctttagatttacactgcctctcgtgatgcttgcataccctttctacttgtgggctcgaagtccggggaaaaagggttctcattaccatccagacagtgacttgttcctccctaaagagagaaaggatgtcctcacttctactgcttgttggactgcaatggctgctctgcttgtttgtctcaacttcacaatcggtccaattcaaatgctcaaactttatggaattccttactggataaatgtaatgtggttggactttgtgacttacctgcatcaccatggtcatgaagataagcttccttggtaccgtggcaaggagtggagttacctgagaggaggacttacaacattggatcgtgactacggattgatcaataacatccatcatgatattggaactcatgtgatacatcatcttttcccgcagatcccacattatcatctagtagaagcaacagaagcagctaaaccagtattagggaagtattacagggagcctgataagtctggaccgttgccattacatttactggaaattctagcgaaaagtataaaagaagatcattacgtgagcgacgaaggagaagttgtatactataaagcagatccaaatctctatggagaggtcaaagtaagagcagattga

SEQ ID NO: 66 - protein, 446 aa, Arabidopsis thaliana
MANLVLSECGIRPLPRIYTTPRSNFLSNNNKFRPSLSSSSYKTSSSPLSFGLNSRDGFTRNWALNVSTPLTTPIFEESPLEEDNKQRFDPGAPPPFNLADIRAAIPKHCWVKNPWKSLSYVVRDVAIVFALAAGAAYLNNWIVWPLYWLAQGTMFWALFVLGHDCGHGSFSNDPKLNSVVGHLLHSSILVPYHGRRISHRTHHQNHGHVENDESWHPMSEKIYNTLDKPTRFFRFTLPLVMLAYPFYLWARSPGKKGSHYHPDSDLFLPKERKDVLTSTACWTAMAALLVCLNFTIGPIQMLKLYGIPYWINVMWLDFVTYLHHHGHEDKLPWYRGKEWSYLRGGLTTLDRDYGLINNIHHDIGTHVIHHLFPQIPHYHLVEATEAAKPVLGKYYREPDKSGPLPLHLLEILAKSIKEDHYVSDEGEVVYYKADPNLYGEVKVRAD

SEQ ID NO: 67 - DNA, 1578 bp, Arabidopsis thaliana
  CDS (1)..(1578)
atggaggacgaaccaaagctcccaaccgatgacggtccaactttcaacgaatcgtgtaaaatctcgtctgagatattgaccgccggtgatcggaaattacttaaagttgaactcctcaaagaggagaccacgctcgtatcgtggaagaagcttatggatgaggctagcaaagaaaacggcggcttgttcgtttcggctcccgaacggcttcttaatgccaaccctaacctcgagtttcgccttgcaccgggggcacaaacagagaatgaaatggtgaatcaacctcatcctaatcgtcttaactctgttatagccaagattgagagactttatatgggtaaagacggtagtgatggggaagagttagacggtgctcctgacgatgatgactatgacactgaagattcatttatcgatgatgctgaattggatgagtattttgaagttgataattcgccaattaaacatgatggattttttgtcaatagaggaaagttagaacgaattgaaccttcagctacatcgaaccagcagcaaccaaagaaaaggcgaaggaaggagtcagcaaaaccttgtggcgatgttgttgatgtatccagaaaacgagccaagatggctaagacggctgggggaaaggatcaatctgcttctcctgggccctcttcgaagaaaatttccaatgattcaaagacggtgcaagattcgttttcccctttgaaagcgcaaaatggcaatgattccttagttttggaaaatgtgaagcatactgataaagcgaatcaccagccaatgaatgccacgagtccgaagtcaaaggcagctggatcttctggcccccttcatccgaagtgcagcagcaaaagtgttcatgaacaatctaattcccctccaggaaaatctcggccaaatgtttcggcaaaatcagcagtagttcgtcagcaagttaacaatggcatgcctgacctggacattgcaacggaaagcaaaacatctattcaaatatctaaaaaaagcggttcaaatggccggcctaaatactcgacacttgagaaagccatcaggaatttggagaagttggtcgctgaatcaaggcctcctgctgccactgagaatcaagatgccgatatctcttcccaagcagtgaagaggggattgccaggagatgtaaaattgcatcttgctaaagttgctagaatcgcgtatgcgagccaaggtgaaatatcaggagagttaatcaatcgtctcatgggcattgtcggtcatctaatacagattagatcacttaagaggaacttgaaaatcatgattgattcgatcgtcactgcaaatcgagaaaaagatactagatttcagcggatcaagagtgaaataactgagatgttaaaaacacaagttccacttgtggaatcccaggaaacaaatcaagaagctggaacatcagacgattttcaggatgttggatctcttggaaagtcacctgtgaagaagtttgtcatggatgtggcgctggaggaaaaattgtgtgatctatatgacgtgtttgttgaggtaattaatattttccataaccttacataa

SEQ ID NO: 68 - protein, 525 aa, Arabidopsis thaliana
MEDEPKLPTDDGPTFNESCKISSEILTAGDRKLLKVELLKEETTLVSWKKLMDEASKENGGLFVSAPERLLNANPNLEFRLAPGAQTENEMVNQPHPNRLNSVIAKIERLYMGKDGSDGEELDGAPDDDDYDTEDSFIDDAELDEYFEVDNSPIKHDGFFVNRGKLERIEPSATSNQQQPKKRRRKESAKPCGDVVDVSRKRAKMAKTAGGKDQSASPGPSSKKISNDSKTVQDSFSPLKAQNGNDSLVLENVKHTDKANHQPMNATSPKSKAAGSSGPLHPKCSSKSVHEQSNSPPGKSRPNVSAKSAVVRQQVNNGMPDLDIATESKTSIQISKKSGSNGRPKYSTLEKAIRNLEKLVAESRPPAATENQDADISSQAVKRGLPGDVKLHLAKVARIAYASQGEISGELINRLMGIVGHLIQIRSLKRNLKIMIDSIVTANREKDTRFQRIKSEITEMLKTQVPLVESQETNQEAGTSDDFQDVGSLGKSPVKKFVMDVALEEKLCDLYDVFVEVINIFHNLT

SEQ ID NO: 69 - DNA, 2352 bp, Arabidopsis thaliana
  CDS (1)..(2352)
atgaagacgacgcaactgttcaaaggggcaaatgtttttatgtctcggaatctggtgcctcctgaagtcttcgacacacttctcgatgctttcaagcttaacggtgccgaaatcttcctctgctgcgacccatctcggagtggtccctctgatttccatgtcatcgcttctcccgatcatgagaaatttaaggatcttaaagccaagggttgtaacttaataggtccgcaatgtgcgctcttctgtgcaaaagagggtagaccactgccacaaaggggattcacttgttgcctagccatggatggtctaaaagttcttgcttctggttttctggtagatgagaaggtcaagatcaaggagttggttacttccatggggggcgttttactttccagagcttcttctgatgtgaacttcgtcattgtgaaaaatgtcttggctgccaagtacaagtgggccctgaataagaagccaatcgttactctgaattggttacatcggtgttggaatgagcaccgtgtggttcctcaggaaccatataagattcctcctttttctggattgacaatctgtgtcacaagaattccagcaggtgacaaatacaaagttgctcgaaaatggggtcacattcaaattgtcacacggaaatggtttcagcagtccatcgataaaaaggtttgtctcaatgaagagtcatatcctgttctcggttccatacccttgacaagaggagtgcgagatttgggggttcataatggtctagaaaagtttccttcggctgcaactgcgtccgcggcagattcatatgtttcttgtgctcagtctagagactcagatatagaagcttctgcttcacaaaatgtttttcccacttctatgaatcccagtaccgatgttaaagaaccaggtggaggcccaacggcaaggccgcaagagcaaaacattgatggttgtactgccagggattcagaatccgaagacaatgacttgtacttatcagattgtagaattttcttgcttggttttgaagcttctgaaatgcgtaaacttgctaagttggtccgcagaggtggtggatcccggtatatgctgcttaacgaaagaatgactcatattgttgttggaactccttcagagagagaagcaaggagtgttgcagcttctggtgtcattcaagtagtcatacccagttggcttgaagattgtgatcgtgagaaaaaagaaatccccgttcataatatatatactgctaaccacttgattcttccaagagattctgcatgcttgaccaaggggtcatttgcaaggatgtcaagtatggaacagactaaaaatactcacgaccagaccatggttggttgtttacttgctgttagtagtcatatcctctactcacctcttccctgccagacacctttgcctggattcgaaagcctttgcatatgtagttcccaacataatgagaagaatgtagaactcctgagaaatttgagtgtcgttcttggagcagattttgtggaaagactaaccaggaaagtgactcacttgatatgcaactttgcaaaaggagataagtatgtgagagcttccaagtggggaataatttccgtgacacctgactggctttatgaatgtgttagacagaatcaagttgtttgtacagataacttccatccaagggaattgaccactcaagatcgagaagcagggtctcagtttcatacacagtttgtaccaatggcctcaagggacagtatgtctctacctgtaagtcactctgaagacagggaaaaaattcaaagttttgctggcaaaagtggttgcgggaaaggtgaagtatataacagacttggagaaattggaaaggaacaaacttttccgtctaagaaggcaaaacttttgagagatggtcaagaaagtgatgtgtttcctgtgagagaacttccaagcaattgtgatcgtccttcgcattctggagatggcattgtgactggatatgatgtagcaagtggtcgtgaagttccagatgtggctgatactattgaggatctgttagagcagacaagcaaaattcaagatcagaagtctcctgggaggattttagaaaagactgtatccttaaatgaacaatacaacactgggaatcactctgtcactggcctgtctagacactggataaacagggtccataagaatgacgacatgggcagtcctccaggagatgcaactactgacacttacggaaactttagtgagacgcagacagaatcacaggttgttggttacgaggaagatctttcaggaaggcagatgcttatagacagagttagaacacgaagcagcttaacataa

SEQ ID NO: 70 - protein, 783 aa, Arabidopsis thaliana
MKTTQLFKGANVFMSRNLVPPEVFDTLLDAFKLNGAEIFLCCDPSRSGPSDFHVIASPDHEKFKDLKAKGCNLIGPQCALFCAKEGRPLPQRGFTCCLAMDGLKVLASGFLVDEKVKIKELVTSMGGVLLSRASSDVNFVIVKNVLAAKYKWALNKKPIVTLNWLHRCWNEHRVVPQEPYKIPPFSGLTICVTRIPAGDKYKVARKWGHIQIVTRKWFQQSIDKKVCLNEESYPVLGSIPLTRGVRDLGVHNGLEKFPSAATASAADSYVSCAQSRDSDIEASASQNVFPTSMNPSTDVKEPGGGPTARPQEQNIDGCTARDSESEDNDLYLSDCRIFLLGFEASEMRKLAKLVRRGGGSRYMLLNERMTHIVVGTPSEREARSVAASGVIQVVIPSWLEDCDREKKEIPVHNIYTANHLILPRDSACLTKGSFARMSSMEQTKNTHDQTMVGCLLAVSSHILYSPLPCQTPLPGFESLCICSSQHNEKNVELLRNLSVVLGADFVERLTRKVTHLICNFAKGDKYVRASKWGIISVTPDWLYECVRQNQVVCTDNFHPRELTTQDREAGSQFHTQFVPMASRDSMSLPVSHSEDREKIQSFAGKSGCGKGEVYNRLGEIGKEQTFPSKKAKLLRDGQESDVFPVRELPSNCDRPSHSGDGIVTGYDVASGREVPDVADTIEDLLEQTSKIQDQKSPGRILEKTVSLNEQYNTGNHSVTGLSRHWINRVHKNDDMGSPPGDATTDTYGNFSETQTESQVVGYEEDLSGRQMLIDRVRTRSSLT

SEQ ID NO: 71 - DNA, 816 bp, Arabidopsis thaliana
  CDS (1)..(816)
atgcaacgtttctgtataaagacatctagcattgagatagatccacttgctgcgccttccgctttcgtttcattcctgatgtcggtgaggggaaatgaacttgacagatacgatgcagagaatcttgcacatgctctacttcatatgcctggcttggaatctcttgacctgagcgggaaccccattgaagacagtgggatcagaagcttaatatcttacttcacaaagaatccggattctcgtttagccgatctgaatttggagaactgtgagctatcatgttgtggagttattgagtttcttgataccctgtcgatgctggagaaacctttaaagttcctgtctgttgcagataatgccctcggaagcgaggttgcagaggctgtagtaaactctttcacaatctccatcgagtcgctcaatattatgggtataggactaggtcctctcgggtttcttgcattaggcagaaaacttgaaaaagtgtcgaagaagctgctgagtattaatataagcaaaaaccgtggaggactagagaccgctagattcctgtcaaagctcatacccttggcaccaaaactcatctcaatcgacgcatcctacaatcttatgccacctgaagccttgctcatgctatgtgattccctgagaactgcaaaaggtgatctcaaacgtcttgacatgactgggaatagttgcatcagccacgaagctgaccattcttctctactccatgaatttcaacacaacggagaacccatcttcgttttaccttcatcctcggtttcacatgttccttacgatgatgacccgtag

SEQ ID NO: 72 - protein, 271 aa, Arabidopsis thaliana
MQRFCIKTSSIEIDPLAAPSAFVSFLMSVRGNELDRYDAENLAHALLHMPGLESLDLSGNPIEDSGIRSLISYFTKNPDSRLADLNLENCELSCCGVIEFLDTLSMLEKPLKFLSVADNALGSEVAEAVVNSFTISIESLNIMGIGLGPLGFLALGRKLEKVSKKLLSINISKNRGGLETARFLSKLIPLAPKLISIDASYNLMPPEALLMLCDSLRTAKGDLKRLDMTGNSCISHEADHSSLLHEFQHNGEPIFVLPSSSVSHVPYDDDP

SEQ ID NO: 73 - DNA, 600 bp, Arabidopsis thaliana
  CDS (1)..(600)
atggaggaagctttagaaatggcgagagccaaggatacaaaagagcgcatggctgctgttgaaaggctgcatcaacttctcgaagcttctaggaagagtttgagtcctgcggaagtgacgtcacttgttgattcttgtttggatctccttaaggatagtaattttagagtctctcaaggtgctcttcaagctcttgcttctgctgctgtcctcgctggtgagcatttgaagcttcatttgaatgctcttgttcctgctgttgtcgagcggcttggtgatagtaagcaacctgttagagatgctgcgaggcgtctgttgacgactctcatggaggtttcatctccgacgattatagtggagagagctggttcgtatgcttggatgcataagagttggagagttagggaagagtttgcgcgtactgttacatcggcgattggtcttttcgcatctacggaacttcctcttcagcgtgttatacttgctccggtatctatctctctccctttaaaagctatttggatcatgtttttcttgtattggatcgaatttgattgcggttattttgtttgtttatcagatacttcagatgttaaatga

SEQ ID NO: 74 - protein, 199 aa, Arabidopsis thaliana
MEEALEMARAKDTKERMAAVERLHQLLEASRKSLSPAEVTSLVDSCLDLLKDSNFRVSQGALQALASAAVLAGEHLKLHLNALVPAVVERLGDSKQPVRDAARRLLTTLMEVSSPTIIVERAGSYAWMHKSWRVREEFARTVTSAIGLFASTELPLQRVILAPVSISLPLKAIWIMFFLYWIEFDCGYFVCLSDTSDVK

SEQ ID NO: 75 - DNA, 852 bp, Arabidopsis thaliana
  CDS (1)..(852)
atgatgatgggcaaagaagatctaggtttgagcctaagcttagggttttcacaaaatcacaatcctcttcagatgaatctgaatcctaactcttcattatcaaacaatctccagagactcccatggaaccaaacattcgatcctacatcagatcttcgcaagatagacgtgaacagttttccatcaacggttaactgcgaggaagacacaggagtttcgtcaccaaacagtacgatctcaagcaccattagcgggaagagaagtgagagagaaggaatctccggaaccggcgttggctccggcgacgatcacgacgagatcactccggatcgagggtactcacgtggaacctcagatgaagaagaagacgggggcgaaacgtcgaggaagaagctcaggttatcaaaagatcagtctgcttttctcgaagagactttcaaagaacacaacactctcaatcccaaacagaagctagctttggctaagaagctgaacttgacggcaagacaagtggaagtgtggttccaaaacagaagagctagaaccaagttaaagcaaacggaggtagattgcgaatacttgaaacggtgcgtagagaagctaacggaagagaaccggagacttcagaaagaggctatggagcttcgaactctcaagctgtctccacaattctacggtcagatgactccaccaactacactcatcatgtgtccttcgtgcgagcgtgtgggtggcccatcatcatcgaaccatcaccacaatcacaggcccgtttctatcaatccgtgggttgcttgtgctggtcaggtggctcatgggctgaattttgaagccttgcgtccacgatcgtga

SEQ ID NO: 76 - protein, 283 aa, Arabidopsis thaliana
MMMGKEDLGLSLSLGFSQNHNPLQMNLNPNSSLSNNLQRLPWNQTFDPTSDLRKIDVNSFPSTVNCEEDTGVSSPNSTISSTISGKRSEREGISGTGVGSGDDHDEITPDRGYSRGTSDEEEDGGETSRKKLRLSKDQSAFLEETFKEHNTLNPKQKLALAKKLNLTARQVEVWFQNRRARTKLKQTEVDCEYLKRCVEKLTEENRRLQKEAMELRTLKLSPQFYGQMTPPTTLIMCPSCERVGGPSSSNHHHNHRPVSINPWVACAGQVAHGLNFEALRPRS

SEQ ID NO: 77 - DNA, 4125 bp, Arabidopsis thaliana
  CDS (1)..(4125)
atgagaaattgtcttccaatggaattgaatctgcgcaagggcgacaaggtttgggtcgaagataaggatttggcttggattgctgctgatgtcctcgattcttttgataacaaactccatgttgaaacttctactgggaagaagctatttcggagggatcctgacgatgaagagcataatggagtggatgatatgaccaaactgacatacttgcacgaagctggtgttctttataatctacagaggagatatgctctgaatgatatctatacatacactggaagcattctgatcgctgttaatccattcaaaaagcttccacatctctacaatgggcacatgatggaacagtacatgggagcaccattcggtgagctcagtcctcatgtttttgcagtttctgatgttgcatacagagcaatgattgacgacagtcgaagtcagtcaatacttgttagcggtgaaagtggagctggaaaaactgagacaaccaaactaatcatgcagtatcttacatttgttgggggacgtgctactgacgatgatagaagtgttgagcagcaagtccttgaatcaaatcctctcttggaagcatttggcaatgcaaaaacagttagaaatgataattccagccgttttggaaagtttgtcgaaatccagtttgacacaaatggtagaatatctggtgccgcaatcagaacctatcttctggagagatcacgtgttgtccggataacagaccccgagaggaattatcattgtttttatcaattgtgcgcttcggggaatgacgctgagaaatataaactaagcaaccctcgtcaatttcattatctaaatcaaagcaagacctatgaattagaaggagtcagcagcgcagaagagtataagaatacaaggagggcaatggatattgtgggcataagtcaggatgagcaggaagggatatttcgcacacttgctgcgattctacatcttggaaatgttgagttttcctcagggagagagcacgactcttcagtggtaaaggatccggaatctagacatcatctgcagatggctgctgatcttttcaagtgtgatgcaaatcttttgctggcttcgctctgcacacgttcaattctgacccgtgaaggtatcattatcaaagcacttgaccctaatgctgctgttactagccgggataccctcgcgaagactgtttacgcccatctatttgactggctggttgataagatcaataagtctgttgggcaagatccagaatctcgttttcaaataggagtcctggacatttatggctttgaatgttttaagaataacagttttgaacaattttgcatcaactttgcaaatgaaaagctgcagcaacatttcaacgagcatgtattcaagatggagcaggatgagtacagaaaagaagaaattaattggagttatatcgagtttattgacaaccaagatgtcttggaccttattgagaagaagcctattggggtgattgcactcttagatgaagcttgcatgtttcctagatcaactcatgagtcattttcaatgaagctgtttcagaactttagatttcatccgagattggagaagccaaaattttcagagacggattttactctctctcattatgctggcaaggcaacctttttggataaaaaccgtgattatactatagtggagcattgcaatctgctgtcttcctccaaatgcccttttgttgctggaattttcccctcagccccggaggagtctaccagatcttcttacaaattttcttctgtatcttccagatttaagcaacaacttcaagccctcatggaaactctcagcaaaacagagcctcactatgttcggtgtgtgaagccaaactcactcaacagacctcaaaagtttgagagtcttagtgttttacatcaacttcgttgtgggggtgtactggaagctgttcggattagtctagcagggtatcccactcgaaggaattattcagacttcgtggatcgttttggtctgctagctccagaattcatggatgagagcaatgatgagcaggcactgactgagaaaatcttgagtaaattaggtcttgggaattatcagctaggaaggacaaaagtgttcctaagagctggtcaaattggcattttggactctaggcgggctgaagtccttgatgcttctgcaagacttattcagcgaagactgagaacatttgtaacgcatcagaacttcatctctgcacgggcttctgcaatttcaattcaggcatactgtagaggatgcctgtctcgaaatgcttatgccaccagaaggaatgcggcggcagctgtcttggtccaaaagcatgtgcgcaggtggctgtcaagatgtgcatttgtaaaacttgtatcagctgccattgtattacagtcttgcatccgtgctgactcaactcgcttaaagttttcacatcagaaagagcatcgagctgcttctctaattcaggctcattggagaatccataagtttcgctcagcattcaggcaccgtcagtcatctattattgctattcagtgtcgttggcgacagaagcttgcgaagagagagtttagaaaacttaaacaggttgctaatgaagcaggtgctttgcgattagctaaaacgaaacttgaaaaacggttagaagatcttgaatggcggttgcagcttgagaaacgattgagaacaagtggtgaagaggccaagtcaagtgaaatatccaagcttcagaaaacattggaatccttcagcctcaaactagacgcagctaggctggctaccattaatgagtgcaataaaaatgcggtacttgaaaagcaactagacatatccatgaaggagaagtctgctgttgaaagagagcttaatggaatggttgaactaaaaaaagataacgccttgctgaagaattcgatgaactccttggaaaagaagaatcgggttcttgagaaggagcttctcaatgctaaaaccaattgcaataatacactacagaagttgaaggaagctgaaaaaaggtgttctgaactccagacgagtgttcaaagtcttgaggagaaactctctcatctggaaaacgagaaccaggtcttgatgcaaaagacgctaattacatccccagagagaataggacagatacttggtgaaaaacactctagtgctgttgtaccagcccaaaatgacaggagatctgtatttgagaactacgaattgctctccaggtgtataaaggaaaatttgggattcaatgatgataagccactggctgcctgtgtaatatacaaatgtcttctgcactggcgtgcctttgaatctgagagcacagccatatttaacatcattattgagggaatcaatgaagccctgaagagaaatctgcggtcaaatagttttctaaatgcaagtgctcagcgttctgggagggctgcatatggagtaaagtctccttttaaacttcatggacctgatgatggtgcttcgcatatagaagcaagatatccagcattattatttaaacagcagctgacagcatgtgtggagaagatttatggtttaattcgtgataatttgaaaaaagaattatcaccgcttctgggatcatgcattcaggtaccctcgttcttcattcgcaaacttgtgactcaggttttctcattcatcaacctatcacttttcaacagtcttcttcttcgtcgtgaatgttgcacattttcaaatggggaatatgtgaaatctgggatttcagaattggagaagtggatagctaatgcgaaggaggaggtattgactataaggcaaatatatcgaataagtacgatgtactgggatgataaatatggaactcaaagtgtctcaagtgaggtggtttctcaaatgagggtacttgtggacaaggataaccaaaaacaaacatcaaattcgttcttgctggacgatgatatgagcattcctttctctgcagaagatatagacaaggctattccagtattagacccatcagaaatagaacctccaaaattcgtatcagaatatacttgtgcacagtcccttgtgaagaaaccctccatagcttcaacctcaaagcagatcatttga

SEQ ID NO: 78 - protein, 1374 aa, Arabidopsis thaliana
MRNCLPMELNLRKGDKVWVEDKDLAWIAADVLDSFDNKLHVETSTGKKLFRRDPDDEEHNGVDDMTKLTYLHEAGVLYNLQRRYALNDIYTYTGSILIAVNPFKKLPHLYNGHMMEQYMGAPFGELSPHVFAVSDVAYRAMIDDSRSQSILVSGESGAGKTETTKLIMQYLTFVGGRATDDDRSVEQQVLESNPLLEAFGNAKTVRNDNSSRFGKFVEIQFDTNGRISGAAIRTYLLERSRVVRITDPERNYHCFYQLCASGNDAEKYKLSNPRQFHYLNQSKTYELEGVSSAEEYKNTRRAMDIVGISQDEQEGIFRTLAAILHLGNVEFSSGREHDSSVVKDPESRHHLQMAADLFKCDANLLLASLCTRSILTREGIIIKALDPNAAVTSRDTLAKTVYAHLFDWLVDKINKSVGQDPESRFQIGVLDIYGFECFKNNSFEQFCINFANEKLQQHFNEHVFKMEQDEYRKEEINWSYIEFIDNQDVLDLIEKKPIGVIALLDEACMFPRSTHESFSMKLFQNFRFHPRLEKPKFSETDFTLSHYAGKATFLDKNRDYTIVEHCNLLSSSKCPFVAGIFPSAPEESTRSSYKFSSVSSRFKQQLQALMETLSKTEPHYVRCVKPNSLNRPQKFESLSVLHQLRCGGVLEAVRISLAGYPTRRNYSDFVDRFGLLAPEFMDESNDEQALTEKILSKLGLGNYQLGRTKVFLRAGQIGILDSRRAEVLDASARLIQRRLRTFVTHQNFISARASAISIQAYCRGCLSRNAYATRRNAAAAVLVQKHVRRWLSRCAFVKLVSAAIVLQSCIRADSTRLKFSHQKEHRAASLIQAHWRIHKFRSAFRHRQSSIIAIQCRWRQKLAKREFRKLKQVANEAGALRLAKTKLEKRLEDLEWRLQLEKRLRTSGEEAKSSEISKLQKTLESFSLKLDAARLATINECNKNAVLEKQLDISMKEKSAVERELNGMVELKKDNALLKNSMNSLEKKNRVLEKELLNAKTNCNNTLQKLKEAEKRCSELQTSVQSLEEKLSHLENENQVLMQKTLITSPERIGQILGEKHSSAVVPAQNDRRSVFENYELLSRCIKENLGFNDDKPLAACVIYKCLLHWRAFESESTAIFNIIIEGINEALKRNLRSNSFLNASAQRSGRAAYGVKSPFKLHGPDDGASHIEARYPALLFKQQLTACVEKIYGLIRDNLKKELSPLLGSCIQVPSFFIRKLVTQVFSFINLSLFNSLLLRRECCTFSNGEYVKSGISELEKWIANAKEEVLTIRQIYRISTMYWDDKYGTQSVSSEVVSQMRVLVDKDNQKQTSNSFLLDDDMSIPFSAEDIDKAIPVLDPSEIEPPKFVSEYTCAQSLVKKPSIASTSKQII

SEQ ID NO: 79 - DNA, 1392 bp, Arabidopsis thaliana
  CDS (1)..(1392)
atggatttctccggtttgtttctcactctctccgcggcggctctgtttctctgtttactccgatttatcgccggagtccgccgtagctcctccacgaaactccctcttcctccgggaacaatgggttatccttacgtcggcgaaacattccaactttactcacaagaccctaatgtgttctttgcagcaaaacagagaagatacggatcggtgttcaagactcatgtattgggatgtccatgtgtgatgatctcgagccctgaagcagcgaaattcgtattggttacaaagtctcatttgtttaaaccgacttttccggccagtaaagagaggatgcttggaaaacaagccatcttcttccatcaaggagattatcattccaaacttagaaagcttgttttaagagctttcatgcctgatgcaatcagaaacatggtccctcacattgaatcaattgctcaagaatcactcaattcttgggatggaactcaactcaacacttaccaggaaatgaaaacatacactttcaatgttgcgttaatctcaatactcggcaaagacgaagtttattaccgagaagatctaaaacgatgctactacattctagagaaaggttacaattcgatgccgattaatcttccaggaacattattccacaaagccatgaaagctcgcaaggagctagctcaaatcctcgctaacatcttatccaaaagaagacaaaacccatcatcacacacagatctcctcggatcattcatggaagacaaagcaggattaaccgacgaacaaatcgccgataacatcatcggagtaatcttcgccgcaagagacacgacggcgagtgttctgacgtggatcctcaagtacttagctgataatccaactgttctagaagctgtcactgaagagcaaatggcaataaggaaagataaaaaagaaggagagagtctcacttgggaagatacaaagaagatgccattaacttatagagtaatccaagagacattaagagctgctacaatcttatctttcacatttagagaagctgtcgaagatgtcgaatacgaaggatatttgataccaaagggatggaaagtactgccactattcagaaatattcatcacaatgctgatatattttcggatccggggaaattcgatccgtcgagattcgaagttgcgccgaaaccgaatacattcatgccttttggtagtgggattcattcttgtccaggcaatgagttagctaaacttgaaatctctgttctaatccatcatctcaccactaagtacagatggtcaatcgtagggcctagcgatggaattcagtatgggccgttcgctcttcctcagaatggattgcctattgccttggaacgaaaaccatag

SEQ ID NO: 80 - protein, 463 aa, Arabidopsis thaliana
MDFSGLFLTLSAAALFLCLLRFIAGVRRSSSTKLPLPPGTMGYPYVGETFQLYSQDPNVFFAAKQRRYGSVFKTHVLGCPCVMISSPEAAKFVLVTKSHLFKPTFPASKERMLGKQAIFFHQGDYHSKLRKLVLRAFMPDAIRNMVPHIESIAQESLNSWDGTQLNTYQEMKTYTFNVALISILGKDEVYYREDLKRCYYILEKGYNSMPINLPGTLFHKAMKARKELAQILANILSKRRQNPSSHTDLLGSFMEDKAGLTDEQIADNIIGVIFAARDTTASVLTWILKYLADNPTVLEAVTEEQMAIRKDKKEGESLTWEDTKKMPLTYRVIQETLRAATILSFTFREAVEDVEYEGYLIPKGWKVLPLFRNIHHNADIFSDPGKFDPSRFEVAPKPNTFMPFGSGIHSCPGNELAKLEISVLIHHLTTKYRWSIVGPSDGIQYGPFALPQNGLPIALERKP

SEQ ID NO: 81 - DNA, 1452 bp, Arabidopsis thaliana
  CDS (1)..(1452)
atggcggatttgttaagaaaagtgaaatcgataaagaagaagcaggatcagagcaatcatcaagctctgatccttggcaaatacgaaatgggtaggcttcttggccacggaaccttcgctaaagtctatctcgcacgaaacgctcaatctggagaaagcgtagcgatcaaggtaattgacaaagagaaagttctcaaatccggtttaatcgcacacatcaaacgcgagatctcgatcttgcgccgtgttcgtcatcctaacatcgttcagctattcgaagtcatggcgacgaaatctaagatctatttcgtaatggaatatgttaaaggaggtgaattgttcaacaaggtagctaaaggaaggttaaaagaagaaatggcacgtaaatattttcaacagttgatctcagccgtatcgttttgtcacttccgtggtgtttatcatcgagatttgaaaccggagaatcttcttttagacgaaaatggaaacctaaaagtctctgattttggtcttagtgctgtttctgatcagattcgacaagatgggttatttcatactttttgtgggacccctgcttacgtggcaccggaggttcttgctcggaaaggctacgatggagctaaagtcgatatttggtcttgtggagtgatcttgtttgtgttaatggcagggtttcttccttttcatgatcggaatgttatggctatgtataagaagatttacagaggagattttaggtgtccgagatggtttccggttgagattaaccggttattgattcgaatgttggagactaaaccggagagacggtttacaatgccggatattatggagactagttggttcaagaaaggttttaagcatattaagttttatgttgaagatgatcatcagctttgtaacgttgctgatgatgatgagatcgaatcgattgaatcggtttcggggaggtcttctacggtttctgaaccggaagacttcgagtcttttgatgggaggagaagaggtggttcgatgcctagaccggcaagtttgaatgctttcgatctcatttcgttttcgccaggttttgatctttcgggtttgtttgaggatgatggtgaaggatctaggtttgtgtctggtgctcctgttggtcagatcatttctaagttggaggaaatcgcgaggattgtgagttttactgtgcgaaagaaggattgtaaagtgagtcttgaaggttcaagagaaggaagtatgaaaggtccattgtcaattgctgctgagatatttgaactgacaccagctttggttgttgttgaagtgaagaagaaaggaggtgataaaatggagtatgatgagttttgtaataaggagttgaaacctaagttgcagaatttgtcttccgaaaatggccaacgggtttctggttcgcgttctttgccatcgtttttactttctgatactgattag

SEQ ID NO: 82 - protein, 483 aa, Arabidopsis thaliana
MADLLRKVKSIKKKQDQSNHQALILGKYEMGRLLGHGTFAKVYLARNAQSGESVAIKVIDKEKVLKSGLIAHIKREISILRRVRHPNIVQLFEVMATKSKIYFVMEYVKGGELFNKVAKGRLKEEMARKYFQQLISAVSFCHFRGVYHRDLKPENLLLDENGNLKVSDFGLSAVSDQIRQDGLFHTFCGTPAYVAPEVLARKGYDGAKVDIWSCGVILFVLMAGFLPFHDRNVMAMYKKIYRGDFRCPRWFPVEINRLLIRMLETKPERRFTMPDIMETSWFKKGFKHIKFYVEDDHQLCNVADDDEIESIESVSGRSSTVSEPEDFESFDGRRRGGSMPRPASLNAFDLISFSPGFDLSGLFEDDGEGSRFVSGAPVGQIISKLEEIARIVSFTVRKKDCKVSLEGSREGSMKGPLSIAAEIFELTPALVVVEVKKKGGDKMEYDEFCNKELKPKLQNLSSENGQRVSGSRSLPSFLLSDTD

SEQ ID NO: 83 - DNA, 1320 bp, Arabidopsis thaliana
  CDS (1)..(1320)
atggataaaaacggcatagttttgatgcgaaaatatgaattaggtcgtcttctaggtcaaggcacattcgcaaaagtgtaccacgcacgcaacataaaaacaggagaaagcgtagcgatcaaggtgatcgacaaacagaaagttgcgaaagtcggattaatcgatcaaatcaaacgagaaatatcagtgatgcgtctcgttcgtcacccccacgtcgtcttcctccatgaagtaatggcgagcaagacaaagatctatttcgctatggaatacgttaaaggcggtgagctttttgataaagtctctaaaggaaagcttaaagaaaacattgctcgaaaatatttccagcaattgatcggagcaatcgattattgccatagccgcggagtttaccaccgcgatctcaaaccggagaatcttcttctagacgaaaacggcgatttgaaaatatcggattttggccttagcgcgttgagggagtcgaagcagcaagatggcttgcttcacacgacatgtggaacacctgcttacgtggcacctgaagtgataggcaagaaaggttatgatggagctaaagccgatgtttggtcttgcggggttgtgttgtacgtgctattggctggatttcttccgtttcacgagcaaaatcttgtggaaatgtatcggaaaatcacgaaaggcgaattcaaatgtccgaattggtttcctcccgaggtcaagaagttgttgtctcggattcttgaccctaaccctaattcaagaatcaagattgaaaaaatcatggagaattcctggtttcaaaagggtttcaagaagatcgaaacgcctaaatctcccgaaagtcatcagatcgactcactgatcagcgatgtccacgcagctttttccgtaaaaccgatgtcttacaacgcgtttgacttgatctcttcgctgtctcaaggattcgatctctcgggtttgtttgagaaagaagagagatcagaatcgaagtttacaacgaagaaagatgcaaaagagatagtgtcgaaattcgaggagatagcaacaagtagtgagagattcaatttgacgaagagcgatgtaggagtgaagatggaagataagagagaaggaagaaaaggacatcttgcgattgatgttgagatatttgaagtgacaaatagttttcatatggttgagtttaagaaaagtggaggtgatacaatggagtataagcaattttgtgatcgtgagcttaggccttctttgaaagatattgtttggaaatggcaaggaaacaacaacaatagcaacaatgagaagattgaagtgatacattaa

SEQ ID NO: 84 - protein, 439 aa, Arabidopsis thaliana
MDKNGIVLMRKYELGRLLGQGTFAKVYHARNIKTGESVAIKVIDKQKVAKVGLIDQIKREISVMRLVRHPHVVFLHEVMASKTKIYFAMEYVKGGELFDKVSKGKLKENIARKYFQQLIGAIDYCHSRGVYHRDLKPENLLLDENGDLKISDFGLSALRESKQQDGLLHTTCGTPAYVAPEVIGKKGYDGAKADVWSCGVVLYVLLAGFLPFHEQNLVEMYRKITKGEFKCPNWFPPEVKKLLSRILDPNPNSRIKIEKIMENSWFQKGFKKIETPKSPESHQIDSLISDVHAAFSVKPMSYNAFDLISSLSQGFDLSGLFEKEERSESKFTTKKDAKEIVSKFEEIATSSERFNLTKSDVGVKMEDKREGRKGHLAIDVEIFEVTNSFHMVEFKKSGGDTMEYKQFCDRELRPSLKDIVWKWQGNNNNSNNEKIEVIH

SEQ ID NO: 85 - DNA, 963 bp, Arabidopsis thaliana
  CDS (1)..(963)
atgtcaaacccattgaaagagtcaagagaggatattgcaaattctactcctcacatgagggataatgagtatgttcggctagttgtggctcatgaagcctccccagctgaaaccgtgttgtctctatcgcaatcagaggtgcagagtaagaaatttatgtggtggttaaaagctttgggaatatgtgcagttgctctcttgcttacgcttgttttcggaaaatggggagttccgtttgtgtttcaaaaggttcttattccaattttgcaatgggaagcaactgcgtttggccgtcctatgctcgcgattgtccttgttgtttccttggctttgtttcctgtgttcttgataccttctggtccttccatgtggttagctgggatgatttttggttatggtctcggttttgttattatcatggttggaaccaccattggcatggttctcccttacttaatcgggcttatgttccgtgatcgcctccatcaatggttaaaaagatggcctcgtcaagctgctgttctaagactagctgcagaaggaagctggttccatcaattcagagtcgtggcaatctttcgggtttccccatttccttacacgatttttaactacgcaatcgtcgtgacaagcatgagattctggccttacttcttcggatccatagcaggaatgataccagaagctttcatctacatttacagcggtcggttaatcagaacattcgcagatgtgcaatacggacatcaacgtttgacaacagtggagattgtgtacaatgtaatctccttagtcattgcggttgtgaccactgttgctttcactgtgtacgcgaaaagagctttgagagagcttcaaaacgcagaagctaatgaagatgaagaagttcaagtaagaaaagtgagattcgagatgaagaacgtagttcagcacgaagaagataatcatcagcgtttgccttag

SEQ ID NO: 86 - protein, 320 aa, Arabidopsis thaliana
MSNPLKESREDIANSTPHMRDNEYVRLVVAHEASPAETVLSLSQSEVQSKKFMWWLKALGICAVALLLTLVFGKWGVPFVFQKVLIPILQWEATAFGRPMLAIVLVVSLALFPVFLIPSGPSMWLAGMIFGYGLGFVIIMVGTTIGMVLPYLIGLMFRDRLHQWLKRWPRQAAVLRLAAEGSWFHQFRVVAIFRVSPFPYTIFNYAIVVTSMRFWPYFFGSIAGMIPEAFIYIYSGRLIRTFADVQYGHQRLTTVEIVYNVISLVIAVVTTVAFTVYAKRALRELQNAEANEDEEVQVRKVRFEMKNVVQHEEDNHQRLP

SEQ ID NO: 87 - DNA, 1716 bp, Arabidopsis thaliana
  CDS (1)..(1716)
atgatgaacaaggaatcgtttggagcttgcttgcttcttacgcttcccgaagatgtgtttgctgttatctctcgttttctttctccaagcgacatttgcaatctaatcttgtgcggcaaaagtctttgtgcccttgtcgattccgagaagacgtggcttgtgcaatgtgaagaagtaaaagttcttcctttgattgaactagtccaatggcgaatcgggatctcttcttacaaggccctttgtaggtttcttgtggaggtggtgaagccgcttcttgggatttgggtgcaagaaaaccctgaacttgggaatgttgtttatgtgatgcctggtttcttgtctgttgttgggtgccggataattccacaaaaggttgctcctttgtggattcaagagggccaagtcaagtggtcaccggtgtttgagataatttgcggctttgatggctctaagggttttttcctccatggaagagacaaacaaggtagtttcttataccctggtttcgttatggacatcgagaagagttgcaatgtgcttctactcgaagttgagccgaggtcagagaagagttcgtgcaatgagattgagagagaagtaggggatccatttggagatctagacttcagtgatagaatgaacttactagatatagtgacaaaacatgtaagtctacgagtcgatgaaccattaacaggaaatttatttcccaccaggtcaaaatatgacgaagcgatgatgttggaacgcagaaacatgctccttaaaatgctcaaatttggtggaaactggaagcacataaacttggaggaggatgagcagttgtgttacaatcatatagagatagacataaaaaaattgttggaaaatcttggtgatgacattgacaacatggaggatatagaggatcagatagaggttacaccaaggaagaagagctttcgccggtttttaagaagtggcattaaacatattcttgggaagttcagttcttcaaagatcaattcgccttcgagcagtgagacaagacgttcgaatcgccaaagctttctcagctctggtaatacattttgccttagtcttaaagcttcatgcactttgatgtcttcatatgaagggtggccaatcatgagcgcagacaacttttcccttcataaactaccaatgaagaaacctctcgatcacgacgtgtatgcgggtttgtggggaggaacgtttggctggccccctgggaaagatattgaagatgagtcccttctcttattaatgctcacttatggagaatctgaagagggtagtgagagaattcttttcgggacgaaaatactcagttattttgctgagcatcctaatggatcctcaatgtttgttgtaaatattgacacgccttcccttgagccgtttccatttgatacagatggaagagatttcgagcattcttacacgggagagggtatcgctgacggttatggattccgataccccggttcaaaacctggttcccttttcgtaagctctaatgatcttcttgcattcgtttggcaaggaactgaagatgtgattacattgcaaagaataaaccttggagagatcttgaagaagagtttaggttcttgtgtttcacctttgcttccaacaaagaattttacatatactaaaaggtcttactcaaacgtgtttgccaagtcatcgacctattcgtcttcctccgagtaa

SEQ ID NO: 88 - protein, 571 aa, Arabidopsis thaliana
MMNKESFGACLLLTLPEDVFAVISRFLSPSDICNLILCGKSLCALVDSEKTWLVQCEEVKVLPLIELVQWRIGISSYKALCRFLVEVVKPLLGIWVQENPELGNVVYVMPGFLSVVGCRIIPQKVAPLWIQEGQVKWSPVFEIICGFDGSKGFFLHGRDKQGSFLYPGFVMDIEKSCNVLLLEVEPRSEKSSCNEIEREVGDPFGDLDFSDRMNLLDIVTKHVSLRVDEPLTGNLFPTRSKYDEAMMLERRNMLLKMLKFGGNWKHINLEEDEQLCYNHIEIDIKKLLENLGDDIDNMEDIEDQIEVTPRKKSFRRFLRSGIKHILGKFSSSKINSPSSSETRRSNRQSFLSSGNTFCLSLKASCTLMSSYEGWPIMSADNFSLHKLPMKKPLDHDVYAGLWGGTFGWPPGKDIEDESLLLLMLTYGESEEGSERILFGTKILSYFAEHPNGSSMFVVNIDTPSLEPFPFDTDGRDFEHSYTGEGIADGYGFRYPGSKPGSLFVSSNDLLAFVWQGTEDVITLQRINLGEILKKSLGSCVSPLLPTKNFTYTKRSYSNVFAKSSTYSSSSE

SEQ ID NO: 89 - DNA, 1632 bp, Arabidopsis thaliana
  CDS (1)..(1632)
atggatgtaggacgatgccccacttgtcaatctcctctaaaatacacaaaactctcatcgaaatgtgatgcgtgctacgaagattaccatgacaacaaacaaggctacaagtgtgattactgctcgttttgtctccacgaggaatgcattaacgctaaccttccttctcgtcataaacaccctctcaaggtcacaaatagctataactcaaagttatgttatctttgtgaaaccaaaaggtatcctcaaatactttatcactgttcacaatgttctttcagtatatgtatcccttgtgcgagaaaacctatcatctttgaccaaactaaggctcatgaccatgaactcgtccaagtaatgataaaaatccccttcacttgtgatgcatgtgggttgtgtagtacagaatatccgtgtctttgtcttcaatgttgtttcatgatccatcgagcttgcatcttcttaccacgtgttatatacatcaaccgtcatgaccatcgtatctctcatgtttcttctctttccactgggaagtggatttgtagggtatgttatgagcatgtcaatgaagactatggggcatatgcttgctcgatttgttcttatttttttcattcaaaatgtgcaacaaatacaaacatttgggatgggagagaacttgaaggggtacccgaagaagatgaaaaagaagaaatcaaaccattcgaagtgatagatcaaaccctaataaaacattttagccatgaacacaatctcaaggcttctatatcatcatcgagactagaggaaccaagagaacgttgttgtgcatgcactcttcctttttattctgaaatgtgctataaatgcacacaatgtgattttattcttcatgattcatgcgctaatcttcctctaaagaaaagacatgagataagcacacacaaacttatgttatgtaccaaaagtcagcttggcgcaaacttcgaaaattcgtttttttgtgttacatgtcaacgttattgcactggtttctcatataatattactggggatgaaaacaacacccaacatagcattgatgtgcgatgtgcttcaatttccgatgcatttaaacatgaaagtcatccacattggctatttgtattttttgatttgttttactcaaggtgtgaaggttgtgacttgaattgttggttttatctacgttgcaaggataaagatgattgtggtggctacaatttatgtttcacatgcgcaactttacccacattggtaagagataaatatgatgatcatcctctttcattatgctacggtgagaaaaatgtgaatgcgagatattgttgcgggatatgcgaagaggatgtacattcaaagagttggttctacaaatgcaatgaatgtggctccactcttcatactaaatgtgtatttcaaaatctaatacactcaaggtctggatacagtttagtgattggtaacaaggggtcatttgatttgcttccaaacaatcgtctctctcggccaatttgctatttatgcaagatccgttgtatgggtgattttgttctccacaaaaaggcggatacaagtatattcatatgctgctcttgtggatttaattataaagatttggttaggaggtattga

SEQ ID NO: 90 - protein, 543 aa, Arabidopsis thaliana
MDVGRCPTCQSPLKYTKLSSKCDACYEDYHDNKQGYKCDYCSFCLHEECINANLPSRHKHPLKVTNSYNSKLCYLCETKRYPQILYHCSQCSFSICIPCARKPIIFDQTKAHDHELVQVMIKIPFTCDACGLCSTEYPCLCLQCCFMIHRACIFLPRVIYINRHDHRISHVSSLSTGKWICRVCYEHVNEDYGAYACSICSYFFHSKCATNTNIWDGRELEGVPEEDEKEEIKPFEVIDQTLIKHFSHEHNLKASISSSRLEEPRERCCACTLPFYSEMCYKCTQCDFILHDSCANLPLKKRHEISTHKLMLCTKSQLGANFENSFFCVTCQRYCTGFSYNITGDENNTQHSIDVRCASISDAFKHESHPHWLFVFFDLFYSRCEGCDLNCWFYLRCKDKDDCGGYNLCFTCATLPTLVRDKYDDHPLSLCYGEKNVNARYCCGICEEDVHSKSWFYKCNECGSTLHTKCVFQNLIHSRSGYSLVIGNKGSFDLLPNNRLSRPICYLCKIRCMGDFVLHKKADTSIFICCSCGFNYKDLVRRY

SEQ ID NO: 91 - DNA, 2460 bp, Arabidopsis thaliana
  CDS (1)..(2460)
atggaagcatttcttaaggaattcggagattattatggatacccagatggtcccaagaacattcaagagatccgcgacaccgaattcaagagattagataaaggtgttgtatacttggatcatgctggttctactttgtattctgagttgcagatggaatatatttttaaggacttcacaagcaatgtttttggaaatccacatagtcaaagtgatatcagttcggccaccagtgaccttatagcggatgctcgacatcaggtgcttgaatactttaatgcatctcctgaagattacagttgcttattcacctccggagccacagcagcgctgaagcttgtcggagagacttttccgtggacccaagacagtaattttttgtataccatggagaatcacaacagtgtacttggtattagggaatatgcattagctcaaggtgcttcagcatgtgcagtggatattgaagaggcagctaaccaaccaggccagcttacaaattcaggaccatctatcaaggtaaagcatcgtgctgtgcagatgagaaacacttctaaactccaaaaggaagagtcaagaggaaatgcctataatctatttgctttcccctcggagtgcaatttttctggcctgaggtttaatctagatctggtgaagttgatgaaagaaaatactgagaccgtgctacaaggctccccctttagcaagagcaagcggtggatggtcttgattgatgctgcaaagggttgtgctacactaccacctgatttatcggagtatcctgcagattttgttgttctgtcattctacaagttatttggttatcctactgggcttggcgctctccttgtacggaatgatgcagccaaattgctcaaaaagacttattttagtggaggcactgttgctgcttcaattgctgacatcgactttgtaaaaagaagggaaagggtggaggagttttttgaggatggttctgcttcattcctgagcatagcagccatccgtcatggcttcaaattactcaagtcgcttacaccttctgcaatttggatgcacacaacgtcactttccatatatgtgaaaaagaagcttcaggctttacgacatggaaacggggctgctgtatgtgttctgtatggcagtgaaaatctggagttatcttcacataaatcaggcccaacggttacattcaacttgaaaagacctgatggctcttggtttggctacttggaggtggagaagcttgcttctttatctggaattcagttacggacaggatgtttttgcaatcctggcgcatgtgcaaagtatctcgagttatcccattctgagctacggtctaatgtagaggctgggcatatttgctgggatgacaatgatgtgataaatggaaaaccaacaggggctgttagggtttcgtttggttatatgtcaacctttgaagatgccaagaaatttattgatttcatcataagttcatttgcttcacctccaaagaagactgggaatggaaccgtcgtcagtggaaggtttcctcaacttcctagtgaagaccttgaaagtaaagaatcttttccaagccactaccttaagtcaattactgtatacccgatcaagtcatgtgctggattttctgtgatacgttggccactttgcagaacaggcctgctgcatgatcgagaatggatggttcagggtctgaccggtgaaattcttacccaaaagaaggtgcctgagatgtctcttataaaaacctttatcgaccttgaggaaggactactgtctgtagaatcttctcgctgcgaagacaagttgcacatcagaatcaagtctgattcatataacccgaggaacgatgagtttgattcacatgccaacatacttgaaaaccgtaatgaggaaactagaatcaatcgttggttcaccaatgccattggtcgacaatgcaagttgctacggtattctagctctacttccaaagactgcttgaacagaaacaagagtcctggtttgtgcagagatttggaaagcaatatcaactttgctaatgaagctcagttcttgttaatctccgaggagagtgttgctgacctaaacagaagattagaagcaaaagacgaggattacaaacgggctcatgaaaaactcaatccacataggttcagaccaaatctggttatatctggaggtgaaccatacggggaagataaatggaaaactgtcaagataggagacaatcatttcacatcattgggcggttgtaaccggtgccagatgataaacataagtaatgaagctggactagtgaagaaatccaatgagcccttaacaactttagcttcatataggagagtaaagggaaagatcttgtttggaacgcttttgagatacgagattgatgagaaaagacaatgttggattggagttggggaagaagttaatccagatattgaataa

SEQ ID NO: 92 - protein, 819 aa, Arabidopsis thaliana
MEAFLKEFGDYYGYPDGPKNIQEIRDTEFKRLDKGVVYLDHAGSTLYSELQMEYIFKDFTSNVFGNPHSQSDISSATSDLIADARHQVLEYFNASPEDYSCLFTSGATAALKLVGETFPWTQDSNFLYTMENHNSVLGIREYALAQGASACAVDIEEAANQPGQLTNSGPSIKVKHRAVQMRNTSKLQKEESRGNAYNLFAFPSECNFSGLRFNLDLVKLMKENTETVLQGSPFSKSKRWMVLIDAAKGCATLPPDLSEYPADFVVLSFYKLFGYPTGLGALLVRNDAAKLLKKTYFSGGTVAASIADIDFVKRRERVEEFFEDGSASFLSIAAIRHGFKLLKSLTPSAIWMHTTSLSIYVKKKLQALRHGNGAAVCVLYGSENLELSSHKSGPTVTFNLKRPDGSWFGYLEVEKLASLSGIQLRTGCFCNPGACAKYLELSHSELRSNVEAGHICWDDNDVINGKPTGAVRVSFGYMSTFEDAKKFIDFIISSFASPPKKTGNGTVVSGRFPQLPSEDLESKESFPSHYLKSITVYPIKSCAGFSVIRWPLCRTGLLHDREWMVQGLTGEILTQKKVPEMSLIKTFIDLEEGLLSVESSRCEDKLHIRIKSDSYNPRNDEFDSHANILENRNEETRINRWFTNAIGRQCKLLRYSSSTSKDCLNRNKSPGLCRDLESNINFANEAQFLLISEESVADLNRRLEAKDEDYKRAHEKLNPHRFRPNLVISGGEPYGEDKWKTVKIGDNHFTSLGGCNRCQMINISNEAGLVKKSNEPLTTLASYRRVKGKILFGTLLRYEIDEKRQCWIGVGEEVNPDIE

SEQ ID NO: 93 - DNA, 1110 bp, Arabidopsis thaliana
  CDS (1)..(1110)
atgaagctttattctgtttccatcatcatcttcgtcttaattgctctctccaccatagttaatgctcaacaagctgctacagattcctgcaactcaactctacctctcaacgacctcaccttcaacaccagcctccttcaatgcaccgaagcttggactccccaaaatttcatcctccgatatgcaagaacggcagagaacacatggagctttatcttatcggcgccggattcaagcgctttcatcgggatcggattctctaccaacggtcagatgatcggaagcagcgcgatcgttggttggataccttccgacggcggttccgggactgtgaaaccgtacttgctcggtgggaaatctcccggagaggttaatcctgaccaaggagatctaacgatcgtcaacggctcgttgaagatcgaatcagtgtcgtcgcgtctttacatgagatttcaattgacggcgacgctgccgcggcagagtcttctttacgctgtgggacctgccggattcttcccatcttcgccggattttaggttgagagagcaccgcttcgtgaccaccacgaccatcaattataatacaggttcgcaaagtgtggttaaagtttcaccacactctaagctaaagaagacacatgggctaatgaacatgttcggctggggaatattgattatcgttggcgccatagtggctcgacatatgaagcaatgggaccccacttggttctatgcccatatcgctctccaaaccactggttttctcctcggtttaactggtgtcatttgcggtttggttcttgaaaaccggctcaaggccaataatgtttccaagcacaaaggcctcgggataaccatacttgtcatgggcgttcttcagatgctggcattgctagctcggccggataagcaatcgaaatacagaaaatattggaattggtatcatcataacataggaagacttctgatcatactggctatttctaacatcttctacggtattcatttggctaaagctggaactagttggaatggtggttacggttttgcggtcgcggtcttggccttgacggctattggattagaagttagaaagttcttgaaaaagtaa

SEQ ID NO: 94 - protein, 369 aa, Arabidopsis thaliana
MKLYSVSIIIFVLIALSTIVNAQQAATDSCNSTLPLNDLTFNTSLLQCTEAWTPQNFILRYARTAENTWSFILSAPDSSAFIGIGFSTNGQMIGSSAIVGWIPSDGGSGTVKPYLLGGKSPGEVNPDQGDLTIVNGSLKIESVSSRLYMRFQLTATLPRQSLLYAVGPAGFFPSSPDFRLREHRFVTTTTINYNTGSQSVVKVSPHSKLKKTHGLMNMFGWGILIIVGAIVARHMKQWDPTWFYAHIALQTTGFLLGLTGVICGLVLENRLKANNVSKHKGLGITILVMGVLQMLALLARPDKQSKYRKYWNWYHHNIGRLLIILAISNIFYGIHLAKAGTSWNGGYGFAVAVLALTAIGLEVRKFLKK

SEQ ID NO: 95 - DNA, 2304 bp, Arabidopsis thaliana
  CDS (1)..(2304)
atggacgttctcgccttatcctcttccgcttccgccgccgcaccctccgcttctctcgccggaaaattcctgtcgtttccttctagggttagagtgagaagaaaccgagagaatttgttagctaaacagaagaagtttttagtttctgcttcgaaaagagaagagcctaagctcaacgaatgggatcaaatggagctcaactttggccgtttactcggcgaagacccgaaattgactttggctaagatagtagctagaaaagtggatccagaagcttcttttattgacattgagaaatctttctacaagaacaaaggtaaaattcctgaagttgaagagattccattggattggtcaaaggataacaagaagaaatctactagttcactggatggattgaaattggtaaagcctgttctgaaagatggagtcaagttcgaaaggccagtgatgaagaagccaagccctgttttgaagaagccattggtggaggctgttgctgctccaaaggtgcagagattgcctaatgttatattgagaaagccgagttcgttttatactagtaatggtgatgatgaggagtctaagttgcggttgaaaccgaatctgacattgaaaatgagaaatgagagggaaaatgagaggtttagtgatatgacattgttgagaaaaccggaaccagtgagcgtagttgcagaagaggaagacaagcctctttctgatgatttaactatggaggaaggagaacaggaaggtggaacatattcacagtatactcttttggagaagccagaagcgaggctccagcctgtcaatgtagaagaggaagttggagatagcggaggagtggaatcatctgagatagtaaacaactcaattcagaagccagaagcaaggccagagcttgagaacatagaaaaggaagttgcagatagcggagttttggaatcatcggagatagaaaataattcaattccaactgaaatgcagctcaatagcgagatgtcctctgaggagaaaactattaacagtgatccactcgagagaattccttcgaaaccaatttctcaaaccatcgtcgaagcttctttacaagggaaaccacaaagattagacccgtcttccgctgagccatcagttccgaacataggaaaaccgtcagtcgtgaaccatgaaggccgtcaggtctctgttgagctcaagggccctcctaccagatcgtccttggaggaaaatgattggaataaggcagagtctctagttaaaacagaattacgagcagatgttgagctaataagttcaagcactagaggatttgctgtttcctatggatctttgattggatttttaccctaccggaaccttgcagcaaaatggaagtttctcgcatttgaatcatggttaagaagaaaaggtgtagatccatcaccgtatcgacaaaaccttggggtaattggaggtcaagatgtcacgagtaaatctccatctccagattcaagcttagattctgaagtcgctacaacgatcaacggagaagtttcttctgatatgaagctggaagatcttcttatggtatatgacagagagaagcagaagttcctgtcatcttttgttggtcagaaaatcaaagtgaatgttgttatggcaaatcgaaattcaaggaagcttatattttcaatgaggccgagagaaaatgaagaggaagttgagaaaaaacgaactcttatggctaagcttcgtgttggggatgttgtgaaatgctgcatcaagaaaattacctattttggtattttctgtgagctagaaggtgtccctgcattggttcaccagtcagaagtttcatgggatgcaactttagaccctgcttcatatttcaagattggtcagattgtggaagcgaaagtgcaccagctagattttgctcttgaacgtatcttcttgtcattaaaagaaattacgcctgatcctcttactgaagctttagaatctgtagttggtggtgataatgatcagttggggggacgattacaagcagcagagctcgacgctgagtggcctgacgtggaatctctgatcaaagagctggaaatggttgaaggaatccaatcagtctcaaaaagtcgtttcttcttgagtccgggtcttgctccaacgtttcaggtttacatggctccaatgtttgagaaccaatacaaactgcttgctcgagctggaaacagagtacaagagcttattgttgaagcatccttgagcaaagaagagatgaaatctacaatcatgtcttgcaccaacagagtagaatga

SEQ ID NO: 96 - protein, 767 aa, Arabidopsis thaliana
MDVLALSSSASAAAPSASLAGKFLSFPSRVRVRRNRENLLAKQKKFLVSASKREEPKLNEWDQMELNFGRLLGEDPKLTLAKIVARKVDPEASFIDIEKSFYKNKGKIPEVEEIPLDWSKDNKKKSTSSLDGLKLVKPVLKDGVKFERPVMKKPSPVLKKPLVEAVAAPKVQRLPNVILRKPSSFYTSNGDDEESKLRLKPNLTLKMRNERENERFSDMTLLRKPEPVSVVAEEEDKPLSDDLTMEEGEQEGGTYSQYTLLEKPEARLQPVNVEEEVGDSGGVESSEIVNNSIQKPEARPELENIEKEVADSGVLESSEIENNSIPTEMQLNSEMSSEEKTINSDPLERIPSKPISQTIVEASLQGKPQRLDPSSAEPSVPNIGKPSVVNHEGRQVSVELKGPPTRSSLEENDWNKAESLVKTELRADVELISSSTRGFAVSYGSLIGFLPYRNLAAKWKFLAFESWLRRKGVDPSPYRQNLGVIGGQDVTSKSPSPDSSLDSEVATTINGEVSSDMKLEDLLMVYDREKQKFLSSFVGQKIKVNVVMANRNSRKLIFSMRPRENEEEVEKKRTLMAKLRVGDVVKCCIKKITYFGIFCELEGVPALVHQSEVSWDATLDPASYFKIGQIVEAKVHQLDFALERIFLSLKEITPDPLTEALESVVGGDNDQLGGRLQAAELDAEWPDVESLIKELEMVEGIQSVSKSRFFLSPGLAPTFQVYMAPMFENQYKLLARAGNRVQELIVEASLSKEEMKSTIMSCTNRVE

SEQ ID NO: 97 - DNA, 2703 bp, Arabidopsis thaliana
  CDS (1)..(2703)
atggggtcagacgaggaagatttcgtgtttcatggaacgccaatagagcgcgaagaagaaatcgcaagccggaagaagaaagcagtcgctggggcttctggcaatcttagaactctccctgcttggaagcaagaggtgactgatgaagaaggccgtagaaggttccatggagcatttactggtggatattctgctgggtattacaatacagttggatcaaaagagggctgggctccacagtcatttacatcatcaaggcagaacagagctggagcgagaaagcaaagtatttcagactttctagatgaagatgaaaaggcggatatggagggcaaatcactgtctgcgagctcacaatttgacacatttgggtttacggcagccgaacattcccgcaagcatgctgagaaagaacagcatgagaggccatcagccattcctggccctgttcctgacgaacttgttgctccagtttcagagtcaattggggtcaaacttttgctaaagatgggatggcggcgtggtcattcaataaaggaagtgcgtgccagttcagatgctcgtagagaagctagaaaagcattcttagccttctatactgatgagaatacaaaggaaacgcccgactcgcttgtttctgagactgaagtggaaacttctctgggtgaagatattaaaatttctgaaagcactcctgtatatgttctgaatccaaagcaagatctgcatggattaggatatgatccttttaagcatgctcctgaatttagaggaaagattgctccgggttttggcattggagcacttgaggaacttgatgttgaggatgaagatgtctatgctggttacgattttgatcagacttatgtcatagaagacgaacagccagcaagacagagcaatgacaatagactgaggttaacctcaaaagagcatgacgttctgccaggttttggagctgctaagaattctgactacagtatggagagatttaatcctccgataatcccgaaggattttgtggcccggcataaattttctggtcctcttgaggctgaaactaagccaactgtttctgctcctccggaagttcctcctcctgcagataataatctgaaacttctgatcgaggggtttgcaacttttgtttcccgttgcgggaaactatacgaggatctttctagagagaagaaccaatcaaatcagctgtttgattttcttcgggaaggtaacggtcatgactactacgcaagaaggctgtgggaggagcagcaaaagcgtaaagatcaaagtaagctgacattagatgttaaggtgtctccaaccgtacagaaaatgactgcagaaacacgtggcagcttattaggggaaaagccattgcagagaagtttgaaagaaaccgatacttctgcttcttctggaggctccttccagttcccgaccaatctctctgacacattcaccaaatcagcttcatctcaagaggcagcagatgctgtgaagcccttcaaagatgatccagctaaacaagaaagatttgagcagtttctcaaggagaaatacaaaggagggttacgtacaacagactccaacagagttaatagcatgtcggaatcagctcgggcacaagagaggctggactttgaggctgcagccgaggcaattgagaaagggaaagcttacaaggaggtcagacgggctaccgaacagcctctcgatttccttgctggaggtcttcagtttacttctgggggaacagagcaaattaaagacactggagtggtagacatgaaatcgagtaagacgtatcctaaaagggaagagttccaatggcgtccttcacctcttttgtgcaaacgttttgatctccccgatccattcatgggaaagctgccacctgctccgcgagcgagaaacaaaatggattctctcgtattcttgccggatacagtgaaagctgcatctgcacgtcaagtatctgagtcgcaagtacctaagaaagagacatcaatagaagagcctgaagttgaggtagaagtggagaatgtggagagacctgttgatctttacaaggctatcttctctgatgattctgaagatgatgaagatcaaccaatgaatggaaagatacaagagggtcaagaaaagaagaatgaagcggctgcaaccacattaaaccggcttatagctggcgatttcctagaatctttagggaaagaactagggttcgaggtgccaatggaagaagagatcaagtccagaagcaaacccgaagattcttctgataaaagacttgatcgacccggattgaaagagaaagtggaggagaagacaagcagcctcacacttgggtctgaagaagaaaagagtagaaaaaagagagagaaatcgccaggaaaacggagtggtggcaacgatctatcatcgagtgaatcctcaggagatgaacggaggagaaaacgatataataagaaggatagacatagaaacgattcagagagcgattcatccagcgactaccacagcagggataagcaaggatcaagatctaggagcaagcggagagaatcttctagagagaagagaagtagccacaagaagcactcaaagcatcgcaggaccaagaagtcttcttcttcacggtatagctcagacgaagaacaaaaagagtcaaggcgggagaagaagaggcgacgagactga

SEQ ID NO: 98 - protein, 900 aa, Arabidopsis thaliana
MGSDEEDFVFHGTPIEREEEIASRKKKAVAGASGNLRTLPAWKQEVTDEEGRRRFHGAFTGGYSAGYYNTVGSKEGWAPQSFTSSRQNRAGARKQSISDFLDEDEKADMEGKSLSASSQFDTFGFTAAEHSRKHAEKEQHERPSAIPGPVPDELVAPVSESIGVKLLLKMGWRRGHSIKEVRASSDARREARKAFLAFYTDENTKETPDSLVSETEVETSLGEDIKISESTPVYVLNPKQDLHGLGYDPFKHAPEFRGKIAPGFGIGALEELDVEDEDVYAGYDFDQTYVIEDEQPARQSNDNRLRLTSKEHDVLPGFGAAKNSDYSMERFNPPIIPKDFVARHKFSGPLEAETKPTVSAPPEVPPPADNNLKLLIEGFATFVSRCGKLYEDLSREKNQSNQLFDFLREGNGHDYYARRLWEEQQKRKDQSKLTLDVKVSPTVQKMTAETRGSLLGEKPLQRSLKETDTSASSGGSFQFPTNLSDTFTKSASSQEAADAVKPFKDDPAKQERFEQFLKEKYKGGLRTTDSNRVNSMSESARAQERLDFEAAAEAIEKGKAYKEVRRATEQPLDFLAGGLQFTSGGTEQIKDTGVVDMKSSKTYPKREEFQWRPSPLLCKRFDLPDPFMGKLPPAPRARNKMDSLVFLPDTVKAASARQVSESQVPKKETSIEEPEVEVEVENVERPVDLYKAIFSDDSEDDEDQPMNGKIQEGQEKKNEAAATTLNRLIAGDFLESLGKELGFEVPMEEEIKSRSKPEDSSDKRLDRPGLKEKVEEKTSSLTLGSEEEKSRKKREKSPGKRSGGNDLSSSESSGDERRRKRYNKKDRHRNDSESDSSSDYHSRDKQGSRSRSKRRESSREKRSSHKKHSKHRRTKKSSSSRYSSDEEQKESRREKKRRRD

SEQ ID NO: 99 - DNA, 1074 bp, Arabidopsis thaliana
  CDS (1)..(1074)
atgtcgtccccggaaaagttttcgccagcgccggaatcgaactcaaatccgtcacttcccgatgctttgataataagctgcatcgcacgagtctcaagattgtattatccgattctctcctttgtctccaagagctttcgatctctcctagcttcaccggagctttacaaggaacggtcactcttgaaccgcaccgagggttgtctatatgtatgcttatacttaaatccttttgagagccctagctggtttactctctgcttgaaacctgatcaagccctatcttctgaaacaagtaataagaagaagtcaagtgggtatgttttggctacagtatcaattccacatcctcgtcttgtgcaacgttccagtctcgtggcggttggttctaatatctacaacattggcagatccatatcaccttactctagtgtctcgatttttgattgccggtctcacacgtggcgcgaggctccaagcttgccagtggagctagttgaagtttctgctggcgtccttgacggaaagatatatgtagccggaagttgcaaagatggagattctcttaacttgaagaacactttcgaggtgttcgacacaaaaacacaagtttgggatcatgtacctatcccttacaacgaaacaaaacacaacatttactccaaaagcttatgtattgacgaaaagtggtatgtaggggctaagagaaaggtggtttcttacaatcccaagaaaggtatatgggaccttgttgaatcagagatgtgtagttataagtcttcatatgattattgtgagatagagaacgttttgtactctgtcgaaaaaacatggcgtggcactgttttcagatggtatgacactgagctaggacggtggagaaagttggagggtttgaatatgccttatagtgggactggtgacagaggcggtaagaagatgatttggtgtgcggtgattacgcttgaaaggcgcaaaaatagtggaatttggggaaacgttgagtggtttgctcatgtgcttacagttcctaaaacatttgttttccaaaagtttcttgctgctactgtctaa

SEQ ID NO: 100 - protein, 357 aa, Arabidopsis thaliana
MSSPEKFSPAPESNSNPSLPDALIISCIARVSRLYYPILSFVSKSFRSLLASPELYKERSLLNRTEGCLYVCLYLNPFESPSWFTLCLKPDQALSSETSNKKKSSGYVLATVSIPHPRLVQRSSLVAVGSNIYNIGRSISPYSSVSIFDCRSHTWREAPSLPVELVEVSAGVLDGKIYVAGSCKDGDSLNLKNTFEVFDTKTQVWDHVPIPYNETKHNIYSKSLCIDEKWYVGAKRKVVSYNPKKGIWDLVESEMCSYKSSYDYCEIENVLYSVEKTWRGTVFRWYDTELGRWRKLEGLNMPYSGTGDRGGKKMIWCAVITLERRKNSGIWGNVEWFAHVLTVPKTFVFQKFLAATV

SEQ ID NO: 101 - DNA, 2520 bp, Arabidopsis thaliana
  CDS (1)..(2520)
atggttaaagtaaggaagatggagatgattttattactaattcttgtgattgtggtggcggcgacggcggcgaatgtgacttatgaccaccgtgcattagtaatcgacgggaaacggaaagttctaatctctggttctattcattatcctcggagtactcctgagatgtggccagagcttatacagaaatctaaagacggtggtttagatgttatagagacgtatgtgttttggagtggtcacgaaccggagaaaaataagtataattttgaaggaagatatgatttagtgaaatttgtgaagcttgcggctaaagctggtctctatgttcatttaagaattggtccttacgtctgtgctgaatggaattacggtggtttcccagtgtggttgcattttgttccaggaattaagtttcgaactgataatgagccatttaaggaagaaatgcagagatttaccacaaagattgttgatttgatgaagcaagaaaagctttatgcatcacaaggaggtccaatcattctctcgcagattgagaatgaatatggaaatattgactcagcttatggtgcggctgctaaaagttatatcaagtggtctgcttctatggctctttcgttagatactggagtaccatggaatatgtgtcaacaaacagatgctcctgatcccatgatcaacacatgcaatggtttctactgtgaccagtttacacctaactcaaataataaaccaaagatgtggaccgagaactggagtggatggttccttggttttggagatccttctccttacagaccagttgaagatcttgcatttgcggtcgcgcggttttaccaacgaggtggaacgttccagaactattacatgtatcacggtggaacaaactttgatagaacaagtggaggaccattaatctctactagttatgattatgatgctccaattgatgagtatggactacttagacaaccaaaatggggacacttacgagatctacacaaggctatcaagctttgtgaagatgcattgattgccacagatccaacaattacttctctaggttcaaatttggaggctgctgtatataaaacagaatctggatcatgtgctgcttttcttgcaaatgttgacacgaagtctgatgcaactgtgactttcaatggaaaatcatataacttgcctgcatggtccgtaagcatcttgccggattgcaaaaatgtagctttcaataccgcaaaggtaaagttcaatagcatctctaaaactcccgatggtggttcgtctgcggagttaggttcacaatggagttacattaaagaacctattggaatttccaaagctgatgcattcttgaaacctggattgctagagcagattaacacaacagctgataaaagcgattacttgtggtactcactaaggacggatataaaaggcgatgagactttccttgacgagggatctaaagccgtccttcacattgaatctcttggtcaagtggtctatgcttttataaatggaaaacttgcaggaagcggacatggcaaacagaagatttctttggatataccgattaatcttgtaaccgggacgaacacaatcgatctccttagtgttaccgtagggcttgcgaattatggagctttctttgacttagtgggagcaggaataaccggacctgtgacacttaaaagcgctaaaggtggtagctcaattgatttggcttcacagcaatggacttatcaggttggactcaaaggagaagacacaggtttggcaactgtagattcttctgaatgggtttcaaagtctcctttgcctactaaacaaccacttatttggtacaagacgacatttgatgctccttctgggagcgagccagtagctatagacttcacgggtacaggaaagggtattgcatgggtgaatggacagagcataggtaggtactggccaactagtatcgctggaaatggcggttgtacagaatcatgcgactatagaggttcttaccgtgcaaacaaatgcctcaagaactgtggaaaaccttcacagacattgtatcatgtacctcgctcgtggctaaaaccgagcgggaacatacttgttctgtttgaggagatgggaggagatccaacacaaatatcatttgcgacaaaacaaacaggaagcaatctttgtctaacggtgtcacagtctcatccaccaccggtggacacatggacttccgactcaaagatctcaaacagaaacagaaccaggccggttctttcgttgaaatgccctatctctactcaggtgatattttctataaaatttgcaagctttggtacacccaaaggtacttgcggtagcttcacacaaggccattgcaatagctctcgatctctctccctcgtccaaaaggcatgtattggattgaggagttgcaacgttgaagtatcgactagagtgttcggggaaccttgtcgtggcgtcgtcaagagcttagctgttgaagcttcttgttcatga

SEQ ID NO: 102 - protein, 839 aa, Arabidopsis thaliana
MVKVRKMEMILLLILVIVVAATAANVTYDHRALVIDGKRKVLISGSIHYPRSTPEMWPELIQKSKDGGLDVIETYVFWSGHEPEKNKYNFEGRYDLVKFVKLAAKAGLYVHLRIGPYVCAEWNYGGFPVWLHFVPGIKFRTDNEPFKEEMQRFTTKIVDLMKQEKLYASQGGPIILSQIENEYGNIDSAYGAAAKSYIKWSASMALSLDTGVPWNMCQQTDAPDPMINTCNGFYCDQFTPNSNNKPKMWTENWSGWFLGFGDPSPYRPVEDLAFAVARFYQRGGTFQNYYMYHGGTNFDRTSGGPLISTSYDYDAPIDEYGLLRQPKWGHLRDLHKAIKLCEDALIATDPTITSLGSNLEAAVYKTESGSCAAFLANVDTKSDATVTFNGKSYNLPAWSVSILPDCKNVAFNTAKVKFNSISKTPDGGSSAELGSQWSYIKEPIGISKADAFLKPGLLEQINTTADKSDYLWYSLRTDIKGDETFLDEGSKAVLHIESLGQVVYAFINGKLAGSGHGKQKISLDIPINLVTGTNTIDLLSVTVGLANYGAFFDLVGAGITGPVTLKSAKGGSSIDLASQQWTYQVGLKGEDTGLATVDSSEWVSKSPLPTKQPLIWYKTTFDAPSGSEPVAIDFTGTGKGIAWVNGQSIGRYWPTSIAGNGGCTESCDYRGSYRANKCLKNCGKPSQTLYHVPRSWLKPSGNILVLFEEMGGDPTQISFATKQTGSNLCLTVSQSHPPPVDTWTSDSKISNRNRTRPVLSLKCPISTQVIFSIKFASFGTPKGTCGSFTQGHCNSSRSLSLVQKACIGLRSCNVEVSTRVFGEPCRGVVKSLAVEASCS

SEQ ID NO: 103 - DNA, 771 bp, Arabidopsis thaliana
  CDS (1)..(771)
atggttggacccgcgcggcctcagatcgttttgtttggatcttccattgttcagatgagctttggccatggtggttggggcgccattctttccgaggtctacgctcgtaaggccgacatcattctgcgaggatattatggatggaactcttctcgtgctttggaagttgtcgaccaagtgttccccaaggatgctgcagtacaaccttctctggtcattgtctattttggaggaaacgactcaatggcgcctcactcgtctggactaggacctcatgtaccacttactgaatatgttgataacatgaagaagatcgctcttcatcttcagagcctttcagacttcacccgaatcatatttcttagttctcctccagtggatgaggctaaagttcgccagaaccaaagcccatacttgagcgaggtaatccgcacaaacgacctctgcaagacttattcagatgcttgtgtagagctgtgccaagaactcggcctagaagtagttgatctcttctctacttttcagaaagcagatgactggaaaactgtttgcttcacagacgggattcatttgtcagcacaaggaagcaaaatagtagcgggagagatactaagagtggttaaagaagcggaatggcatccatcacttcactggaaatcaatgccaacagaattcgcagatgactctccttatgatcttgtatcagcagatggcaaacagacagtaaattcttcagaatggacttatttctgggaagaacaatgggactaa

SEQ ID NO: 104 - protein, 256 aa, Arabidopsis thaliana
MVGPARPQIVLFGSSIVQMSFGHGGWGAILSEVYARKADIILRGYYGWNSSRALEVVDQVFPKDAAVQPSLVIVYFGGNDSMAPHSSGLGPHVPLTEYVDNMKKIALHLQSLSDFTRIIFLSSPPVDEAKVRQNQSPYLSEVIRTNDLCKTYSDACVELCQELGLEVVDLFSTFQKADDWKTVCFTDGIHLSAQGSKIVAGEILRVVKEAEWHPSLHWKSMPTEFADDSPYDLVSADGKQTVNSSEWTYFWEEQWD

SEQ ID NO: 105 - DNA, 2466 bp, Arabidopsis thaliana
  CDS (1)..(2466)
atggaaatgcccggtagaagatctaattacactttgcttagtcaattttctgacgatcaggtgtcagtttccgtcaccggagctcctccgcctcactatgattccttgtcgagcgaaaacaggagcaaccataacagcgggaacaccgggaaagctaaggcggagagaggcggatttgattgggatcctagcggtggtggtggtggtgatcataggttgaataatcaaccgaatcgggttgggaataatatgtatgcttcgtctctagggttgcaaaggcaatccagtgggagtagtttcggtgagagctctttgtctggggattattacatgcctacgctttctgcggcggctaacgagatcgaatctgttggatttcctcaagatgatgggtttaggcttggatttggtggtggtggaggagatttgaggatacagatggcggcggactccgctggagggtcttcatctgggaagagctgggcgcagcagacggaggagagttatcagctgcagcttgcattggcgttaaggctttcgtcggaggctacttgtgccgacgatccgaactttctggatcctgtaccggacgagtctgctttacggacttcgccaagttcagccgaaaccgtttcacatcgtttctgggttaatggctgcttatcgtactatgataaagttcctgatgggttttatatgatgaatggtctggatccctatatttggaccttatgcatcgacctgcatgaaagtggtcgcatcccttcaattgaatcattaagagctgttgattctggtgttgattcttcgcttgaagcgatcatagttgataggcgtagtgatccagccttcaaggaacttcacaatagagtccacgacatatcttgtagctgcattaccacaaaagaggttgttgatcagctggcaaagcttatctgcaatcgtatggggggtccagttatcatgggggaagatgagttggttcccatgtggaaggagtgcattgatggtctaaaagaaatctttaaagtggtggttcccataggtagcctctctgttggactctgcagacatcgagctttactcttcaaagtactggctgacataattgatttaccctgtcgaattgccaaaggatgtaaatattgtaatagagacgatgccgcttcgtgccttgtcaggtttgggcttgatagggagtacctggttgatttagtaggaaagccaggtcacttatgggagcctgattccttgctaaatggtccttcatctatctcaatttcttctcctctgcggtttccacgaccaaagccagttgaacccgcagtcgattttaggttactagccaaacaatatttctccgatagccagtctcttaatcttgttttcgatcctgcatcagatgatatgggattctcaatgtttcataggcaatatgataatccgggtggagagaatgacgcattggcagaaaatggtggtgggtctttgccacccagtgctaatatgcctccacagaacatgatgcgtgcgtcaaatcaaattgaagcagcacctatgaatgccccaccaatcagtcagccagttccaaacagggcaaatagggaacttggacttgatggtgatgatatggacatcccgtggtgtgatcttaatataaaagaaaagattggagcaggttcctttggcactgtccaccgtgctgagtggcatggctcggatgttgctgtgaaaattctcatggagcaagacttccatgctgagcgtgttaatgagttcttaagagaggttgcgataatgaaacgccttcgccaccctaacattgttctcttcatgggtgcggtcactcaacctccaaatttgtcaatagtgacagaatatttgtcaagaggtagtttatacagacttttgcataaaagtggagcaagggagcaattagatgagagacgtcgcctgagtatggcttatgatgtggctaagggaatgaattatcttcacaatcgcaatcctccaattgtgcatagagatctaaaatctccaaacttattggttgacaaaaaatatacagtcaaggtttgtgattttggtctctcgcgattgaaggccagcacgtttctttcctcgaagtcagcagctggaacccccgagtggatggcaccagaagtcctgcgagatgagccgtctaatgaaaagtcagatgtgtacagcttcggggtcatcttgtgggagcttgctacattgcaacaaccatggggtaacttaaatccggctcaggttgtagctgcggttggtttcaagtgtaaacggctggagatcccgcgtaatctgaatcctcaggttgcagccataatcgagggttgttggaccaatgagccatggaagcgtccatcatttgcaactataatggacttgctaagaccattgatcaaatcagcggttcctccgcccaaccgctcggatttgtaa

SEQ ID NO: 106 - protein, 821 aa, Arabidopsis thaliana
MEMPGRRSNYTLLSQFSDDQVSVSVTGAPPPHYDSLSSENRSNHNSGNTGKAKAERGGFDWDPSGGGGGDHRLNNQPNRVGNNMYASSLGLQRQSSGSSFGESSLSGDYYMPTLSAAANEIESVGFPQDDGFRLGFGGGGGDLRIQMAADSAGGSSSGKSWAQQTEESYQLQLALALRLSSEATCADDPNFLDPVPDESALRTSPSSAETVSHRFWVNGCLSYYDKVPDGFYMMNGLDPYIWTLCIDLHESGRIPSIESLRAVDSGVDSSLEAIIVDRRSDPAFKELHNRVHDISCSCITTKEVVDQLAKLICNRMGGPVIMGEDELVPMWKECIDGLKEIFKVVVPIGSLSVGLCRHRALLFKVLADIIDLPCRIAKGCKYCNRDDAASCLVRFGLDREYLVDLVGKPGHLWEPDSLLNGPSSISISSPLRFPRPKPVEPAVDFRLLAKQYFSDSQSLNLVFDPASDDMGFSMFHRQYDNPGGENDALAENGGGSLPPSANMPPQNMMRASNQIEAAPMNAPPISQPVPNRANRELGLDGDDMDIPWCDLNIKEKIGAGSFGTVHRAEWHGSDVAVKILMEQDFHAERVNEFLREVAIMKRLRHPNIVLFMGAVTQPPNLSIVTEYLSRGSLYRLLHKSGAREQLDERRRLSMAYDVAKGMNYLHNRNPPIVHRDLKSPNLLVDKKYTVKVCDFGLSRLKASTFLSSKSAAGTPEWMAPEVLRDEPSNEKSDVYSFGVILWELATLQQPWGNLNPAQVVAAVGFKCKRLEIPRNLNPQVAAIIEGCWTNEPWKRPSFATIMDLLRPLIKSAVPPPNRSDL

SEQ ID NO: 107 - DNA, 1239 bp, Arabidopsis thaliana
  CDS (1)..(1239)
atggctacaacaaccacatcatgggaagaactcttaggctcaaagaattgggacactatcttagacccattagaccaatcacttagggaactcatcttacgttgtggcgacttttgtcaagccacctacgatgccttcgtcaacgaccaaaactccaagtactgtggagccagccgctacggcaaatcttctttcttcgacaaggtcatgctcgaaaacgcttccgactacgaggttgtaaacttcctctacgccacagctcgtgtttctctccccgaaggtttgcttctccaatcacaatcaagagattcttgggaccgtgagtctaactggtttggctacattgctgtcacgtctgatgaacggtctaaggctttaggacgccgtgagatctatatagctttgagaggaacgagcaggaactatgagtgggtcaatgttttgggtgctaggccaacttcagctgaccccttgctgcacggacccgagcaggatggttctggtggtgtagttgaaggtacgacttttgatagtgacagtgaagatgaagaagggtgtaaggtgatgctcgggtggctcacaatctatacttctaatcaccccgaatcgaaattcactaagctgagtctacggtcacagttgttagccaagatcaaggagcttctgttgaagtataaggacgagaaaccgagcattgtgttgactggacatagcttgggagctacagaggctgttctggccgcctatgatatagctgagaacggttccagtgatgatgttccggtcactgctatagtctttggttgtccacaggtaggaaacaaggagttcagagacgaagtaatgagtcacaagaacttaaagatcctccatgtaaggaacacgattgatctcttaactcgatacccagggggacttttagggtatgtggacataggaataaactttgtgatcgatacaaagaagtcaccgttcctaagcgattcaaggaatccaggggattggcataatcttcaggcgatgttacatgttgtagctggatggaatgggaagaaaggagagtttaaactgatggttaagagaagtattgcattagtgaacaagtcatgcgagttcttgaaagctgagtgtttggtgccaggatcttggtgggtagagaagaacaaaggactgatcaagaacgaagatggtgaatgggttcttgctcccgttgaagaagaacctgtacctgaattctaa

SEQ ID NO: 108 - protein, 412 aa, Arabidopsis thaliana
MATTTTSWEELLGSKNWDTILDPLDQSLRELILRCGDFCQATYDAFVNDQNSKYCGASRYGKSSFFDKVMLENASDYEVVNFLYATARVSLPEGLLLQSQSRDSWDRESNWFGYIAVTSDERSKALGRREIYIALRGTSRNYEWVNVLGARPTSADPLLHGPEQDGSGGVVEGTTFDSDSEDEEGCKVMLGWLTIYTSNHPESKFTKLSLRSQLLAKIKELLLKYKDEKPSIVLTGHSLGATEAVLAAYDIAENGSSDDVPVTAIVFGCPQVGNKEFRDEVMSHKNLKILHVRNTIDLLTRYPGGLLGYVDIGINFVIDTKKSPFLSDSRNPGDWHNLQAMLHVVAGWNGKKGEFKLMVKRSIALVNKSCEFLKAECLVPGSWWVEKNKGLIKNEDGEWVLAPVEEEPVPEF

SEQ ID NO: 109 - DNA, 1230 bp, Arabidopsis thaliana
  CDS (1)..(1230)
atgcaaacagtgaaagctttgaggagagtgagtgaacccttacaatgggttcggtctgtttcttatggaagacgcttttctgctctcccaaactattccgcatcagatgcagatttcgaagaccaggttctggtggaaggaaaagctaaatcaagagctgccattctcaataacccatcttctctcaatgctctttctgcgcctatggttggtcggttaaagaggctatacgaatcatgggaagagaacccagctatttcctttgttttgatgaagggtagcggtaaaactttctgctctggtgcagatgtcttgtctctttatcactcgatcaatgaaggaaatactgaagaatctaaactctttttcgagaacttgtacaagtttgtatacctccaaggaacgtatttaaaaccaaatatagcaataatggatggtgtgaccatgggttgtggtggtggaatttcacttccagggatgtttcgtgtggctacagataaaactgtgttggcccatccagaggtccaaattggttttcatcctgatgcaggagcttcctattatctttcacggcttcctggttatttaggggaatacttggctctaacggggcagaaacttaatggtgtcgaaatgatagcatgtggccttgccacccactattgcttaaacgcgagacttccgttgattgaagagaggattggtaaactgttgaccgatgatcctgctgtcattgaggattctcttgctcaatatggtgatcttgtttaccctgacagtagcagcgtactgcacaagatagagttgattgataaatattttgggcttgataccgttgaagaaatcattgaagctatggaaaatgaagctgctaattcgtgcaatgaatggtgcaagaaaactctcaaacagatcaaagaagcttcacctttgagcttaaagattactttgcaatctatacgagaaggtagattccaaacccttgatcaatgtctcacacatgaataccgtatatccatttgtggagtctcaaaagtagtctctggcgacttttgcgagggtattcgagcccgtttggtagataaagactttgctccaaagtgggatcctccacgcctagaagatgtgagcaaagacatggtggattgctacttcacgccagcctcagagctcgatgattcagattctgagttgaagctgccaacagctcaacgagagccttatttttga

SEQ ID NO: 110 - protein, 409 aa, Arabidopsis thaliana
MQTVKALRRVSEPLQWVRSVSYGRRFSALPNYSASDADFEDQVLVEGKAKSRAAILNNPSSLNALSAPMVGRLKRLYESWEENPAISFVLMKGSGKTFCSGADVLSLYHSINEGNTEESKLFFENLYKFVYLQGTYLKPNIAIMDGVTMGCGGGISLPGMFRVATDKTVLAHPEVQIGFHPDAGASYYLSRLPGYLGEYLALTGQKLNGVEMIACGLATHYCLNARLPLIEERIGKLLTDDPAVIEDSLAQYGDLVYPDSSSVLHKIELIDKYFGLDTVEEIIEAMENEAANSCNEWCKKTLKQIKEASPLSLKITLQSIREGRFQTLDQCLTHEYRISICGVSKVVSGDFCEGIRARLVDKDFAPKWDPPRLEDVSKDMVDCYFTPASELDDSDSELKLPTAQREPYF

SEQ ID NO: 111 - DNA, 1497 bp, Arabidopsis thaliana
  CDS (1)..(1497)
atgccaggaggatacaaagcgtttgagatctgtgccaagttttgctatgggatgactgttacgctcaatgcttacaacataaccgcggtgcgatgtgcagctgagtatcttgaaatgactgaagatgctgaccgcggtaacctcatatacaagatcgaagttttcctcaactcaggcatattcagaagctggaaagactcaatcattgtgcttcagacaacaagatctcttcttccttggtctgaagatctgaagcttgttggtagatgcatagattctgtttcagctaagatcttggtgaaccctgagactatcacttggtcttatacattcaacaggaagttatctggacctgataagatagtcgaatatcatcgggagaagagagaagagaatgtgattccgaaagattggtgggtcgaagatgtatgtgagctagagattgatatgttcaagagggtgataagtgttgtgaaatctagtggaaggatgaataatggcgtaattgctgaagctcttagatactatgttgcaaggtggttaccagaatctatggagtctttgacatcagaagcttcttcaaacaaagatctcgttgagacggttgttttcttgttgccgaaggtaaacagagcaatgagctactcttcttgcagcttcttgctaaaactccttaaagtttcgatcttggttggagctgatgagacggtgagagaagatttggttgagaacgtgagtttgaagcttcatgaagcgtccgttaaagatttgctgatccatgaagtcgaattagtccatcggattgttgatcagttcatggcggatgagaaacgtgtatctgaagatgaccggtacaaggagtttgttttaggaaatggaattttgttgagtgtaggaagattgattgatgcttatctcgctcttaactctgaacttacactctctagctttgttgagttatctgagttagtcccggaatcagctaggccgatacacgacggtctctacaaagccattgacactttcatgaaggaacatcccgaactaacaaaatccgaaaagaagaggctttgtgggttaatggacgtgaggaaactgacaaatgaagcatcaacgcacgctgcacagaacgagagacttccactacgagtggtggtgcaagttctctactttgagcagctccgagcaaatcacagccccgtggcgtctgttgcggcttcgtcacactcgccggttgagaagacggaggagaacaaaggagaagaagcgacgaagaaggtggagctgagcaagaaaagcagaggaagcaagagcacgaggagtggtggtggtgcacagctgatgccgtcgaggtcaaggaggatctttgagaagatatggcctgggaaaggagagattagcaacaagagctctgaggtttcttctggaagctcacaaagtccgccagccaagtcttctagctcgtcttcccgacgccgcagacattcgatatcgtga

SEQ ID NO: 112 - protein, 498 aa, Arabidopsis thaliana
MPGGYKAFEICAKFCYGMTVTLNAYNITAVRCAAEYLEMTEDADRGNLIYKIEVFLNSGIFRSWKDSIIVLQTTRSLLPWSEDLKLVGRCIDSVSAKILVNPETITWSYTFNRKLSGPDKIVEYHREKREENVIPKDWWVEDVCELEIDMFKRVISVVKSSGRMNNGVIAEALRYYVARWLPESMESLTSEASSNKDLVETVVFLLPKVNRAMSYSSCSFLLKLLKVSILVGADETVREDLVENVSLKLHEASVKDLLIHEVELVHRIVDQFMADEKRVSEDDRYKEFVLGNGILLSVGRLIDAYLALNSELTLSSFVELSELVPESARPIHDGLYKAIDTFMKEHPELTKSEKKRLCGLMDVRKLTNEASTHAAQNERLPLRVVVQVLYFEQLRANHSPVASVAASSHSPVEKTEENKGEEATKKVELSKKSRGSKSTRSGGGAQLMPSRSRRIFEKIWPGKGEISNKSSEVSSGSSQSPPAKSSSSSSRRRRHSIS

SEQ ID NO: 113 - DNA, 8045 bp, Artificial
  vector
actttgatccaacccctccgctgctatagtgcagtcggcttctgacgttcagtgcagccgtcttctgaaaacgacatgtcgcacaagtcctaagttacgcgacaggctgccgccctgcccttttcctggcgttttcttgtcgcgtgttttagtcgcataaagtagaatacttgcgactagaaccggagacattacgccatgaacaagagcgccgccgctggcctgctgggctatgcccgcgtcagcaccgacgaccaggacttgaccaaccaacgggccgaactgcacgcggccggctgcaccaagctgttttccgagaagatcaccggcaccaggcgcgaccgcccggagctggccaggatgcttgaccacctacgccctggcgacgttgtgacagtgaccaggctagaccgcctggcccgcagcacccgcgacctactggacattgccgagcgcatccaggaggccggcgcgggcctgcgtagcctggcagagccgtgggccgacaccaccacgccggccggccgcatggtgttgaccgtgttcgccggcattgccgagttcgagcgttccctaatcatcgaccgcacccggagcgggcgcgaggccgccaaggcccgaggcgtgaagtttggcccccgccctaccctcaccccggcacagatcgcgcacgcccgcgagctgatcgaccaggaaggccgcaccgtgaaagaggcggctgcactgcttggcgtgcatcgctcgaccctgtaccgcgcacttgagcgcagcgaggaagtgacgcccaccgaggccaggcggcgcggtgccttccgtgaggacgcattgaccgaggccgacgccctggcggccgccgagaatgaacgccaagaggaacaagcatgaaaccgcaccaggacggccaggacgaaccgtttttcattaccgaagagatcgaggcggagatgatcgcggccgggtacgtgttcgagccgcccgcgcacgtctcaaccgtgcggctgcatgaaatcctggccggtttgtctgatgccaagctggcggcctggccggccagcttggccgctgaagaaaccgagcgccgccgtctaaaaaggtgatgtgtatttgagtaaaacagcttgcgtcatgcggtcgctgcgtatatgatgcgatgagtaaataaacaaatacgcaaggggaacgcatgaaggttatcgctgtacttaaccagaaaggcgggtcaggcaagacgaccatcgcaacccatctagcccgcgccctgcaactcgccggggccgatgttctgttagtcgattccgatccccagggcagtgcccgcgattgggcggccgtgcgggaagatcaaccgctaaccgttgtcggcatcgaccgcccgacgattgaccgcgacgtgaaggccatcggccggcgcgacttcgtagtgatcgacggagcgccccaggcggcggacttggctgtgtccgcgatcaaggcagccgacttcgtgctgattccggtgcagccaagcccttacgacatatgggccaccgccgacctggtggagctggttaagcagcgcattgaggtcacggatggaaggctacaagcggcctttgtcgtgtcgcgggcgatcaaaggcacgcgcatcggcggtgaggttgccgaggcgctggccgggtacgagctgcccattcttgagtcccgtatcacgcagcgcgtgagctacccaggcactgccgccgccggcacaaccgttcttgaatcagaacccgagggcgacgctgcccgcgaggtccaggcgctggccgctgaaattaaatcaaaactcatttgagttaatgaggtaaagagaaaatgagcaaaagcacaaacacgctaagtgccggccgtccgagcgcacgcagcagcaaggctgcaacgttggccagcctggcagacacgccagccatgaagcgggtcaactttcagttgccggcggaggatcacaccaagctgaagatgtacgcggtacgccaaggcaagaccattaccgagctgctatctgaatacatcgcgcagctaccagagtaaatgagcaaatgaataaatgagtagatgaattttagcggctaaaggaggcggcatggaaaatcaagaacaaccaggcaccgacgccgtggaatgccccatgtgtggaggaacgggcggttggccaggcgtaagcggctgggttgtctgccggccctgcaatggcactggaacccccaagcccgaggaatcggcgtgacggtcgcaaaccatccggcccggtacaaatcggcgcggcgctgggtgatgacctggtggagaagttgaaggccgcgcaggccgcccagcggcaacgcatcgaggcagaagcacgccccggtgaatcgtggcaagcggccgctgatcgaatccgcaaagaatcccggcaaccgccggcagccggtgcgccgtcgattaggaagccgcccaagggcgacgagcaaccagattttttcgttccgatgctctatgacgtgggcacccgcgatagtcgcagcatcatggacgtggccgttttccgtctgtcgaagcgtgaccgacgagctggcgaggtgatccgctacgagcttccagacgggcacgtagaggtttccgcagggccggccggcatggccagtgtgtgggattacgacctggtactgatggcggtttcccatctaaccgaatccatgaaccgataccgggaagggaagggagacaagcccggccgcgtgttccgtccacacgttgcggacgtactcaagttctgccggcgagccgatggcggaaagcagaaagacgacctggtagaaacctgcattcggttaaacaccacgcacgttgccatgcagcgtacgaagaaggccaagaacggccgcctggtgacggtatccgagggtgaagccttgattagccgctacaagatcgtaaagagcgaaaccgggcggccggagtacatcgagatcgagctagctgattggatgtaccgcgagatcacagaaggcaagaacccggacgtgctgacggttcaccccgattactttttgatcgatcccggcatcggccgttttctctaccgcctggcacgccgcgccgcaggcaaggcagaagccagatggttgttcaagacgatctacgaacgcagtggcagcgccggagagttcaagaagttctgtttcaccgtgcgcaagctgatcgggtcaaatgacctgccggagtacgatttgaaggaggaggcggggcaggctggcccgatcctagtcatgcgctaccgcaacctgatcgagggcgaagcatccgccggttcctaatgtacggagcagatgctagggcaaattgccctagcaggggaaaaaggtcgaaaaggtctctttcctgtggatagcacgtacattgggaacccaaagccgtacattgggaaccggaacccgtacattgggaacccaaagccgtacattgggaaccggtcacacatgtaagtgactgatataaaagagaaaaaaggcgatttttccgcctaaaactctttaaaacttattaaaactcttaaaacccgcctggcctgtgcataactgtctggccagcgcacagccgaagagctgcaaaaagcgcctacccttcggtcgctgcgctccctacgccccgccgcttcgcgtcggcctatcgcggccgctggccgctcaaaaatggctggcctacggccaggcaatctaccagggcgcggacaagccgcgccgtcgccactcgaccgccggcgcccacatcaaggcaccctgcctcgcgcgtttcggtgatgacggtgaaaacctctgacacatgcagctcccggagacggtcacagcttgtctgtaagcggatgccgggagcagacaagcccgtcagggcgcgtcagcgggtgttggcgggtgtcggggcgcagccatgacccagtcacgtagcgatagcggagtgtatactggcttaactatgcggcatcagagcagattgtactgagagtgcaccatatgcggtgtgaaataccgcacagatgcgtaaggagaaaataccgcatcaggcgctcttccgcttcctcgctcactgactcgctgcgctcggtcgttcggctgcggcgagcggtatcagctcactcaaaggcggtaatacggttatccacagaatcaggggataacgcaggaaagaacatgtgagcaaaaggccagcaaaaggccaggaaccgtaaaaaggccgcgttgctggcgtttttccataggctccgcccccctgacgagcatcacaaaaatcgacgctcaagtcagaggtggcgaaacccgacaggactataaagataccaggcgtttccccctggaagctccctcgtgcgctctcctgttccgaccctgccgcttaccggatacctgtccgcctttctcccttcgggaagcgtggcgctttctcatagctcacgctgtaggtatctcagttcggtgtaggtcgttcgctccaagctgggctgtgtgcacgaaccccccgttcagcccgaccgctgcgccttatccggtaactatcgtcttgagtccaacccggtaagacacgacttatcgccactggcagcagccactggtaacaggattagcagagcgaggtatgtaggcggtgctacagagttcttgaagtggtggcctaactacggctacactagaaggacagtatttggtatctgcgctctgctgaagccagttaccttcggaaaaagagttggtagctcttgatccggcaaacaaaccaccgctggtagcggtggtttttttgtttgcaagcagcagattacgcgcagaaaaaaaggatctcaagaagatcctttgatcttttctacggggtctgacgctcagtggaacgaaaactcacgttaagggattttggtcatgcattctaggtactaaaacaattcatccagtaaaatataatattttattttctcccaatcaggcttgatccccagtaagtcaaaaaatagctcgacatactgttcttccccgatatcctccctgatcgaccggacgcagaaggcaatgtcataccacttgtccgccctgccgcttctcccaagatcaataaagccacttactttgccatctttcacaaagatgttgctgtctcccaggtcgccgtgggaaaagacaagttcctcttcgggcttttccgtctttaaaaaatcatacagctcgcgcggatctttaaatggagtgtcttcttcccagttttcgcaatccacatcggccagatcgttattcagtaagtaatccaattcggctaagcggctgtctaagctattcgtatagggacaatccgatatgtcgatggagtgaaagagcctgatgcactccgcatacagctcgataatcttttcagggctttgttcatcttcatactcttccgagcaaaggacgccatcggcctcactcatgagcagattgctccagccatcatgccgttcaaagtgcaggacctttggaacaggcagctttccttccagccatagcatcatgtccttttcccgttccacatcataggtggtccctttataccggctgtccgtcatttttaaatataggttttcattttctcccaccagcttatataccttagcaggagacattccttccgtatcttttacgcagcggtatttttcgatcagttttttcaattccggtgatattctcattttagccatttattatttccttcctcttttctacagtatttaaagataccccaagaagctaattataacaagacgaactccaattcactgttccttgcattctaaaaccttaaataccagaaaacagctttttcaaagttgttttcaaagttggcgtataacatagtatcgacggagccgattttgaaaccgcggtgatcacaggcagcaacgctctgtcatcgttacaatcaacatgctaccctccgcgagatcatccgtgtttcaaacccggcagcttagttgccgttcttccgaatagcatcggtaacatgagcaaagtctgccgccttacaacggctctcccgctgacgccgtcccggactgatgggctgcctgtatcgagtggtgattttgtgccgagctgccggtcggggagctgttggctggctggtggcaggatatattgtggtgtaaacaaattgacgcttagacaacttaataacacattgcggacgtttttaatgtactgaattaacgccgaattactagatatcgatttggtgtatcgagattggttatgaaattcagatgctagtgtaatgtattggtaatttgggaagatataataggaagcaaggctatttatccatttctgaaaaggcgaaatggcgtcaccgcgagcgtcacgcgcattccgttcttgctgtaaagcgttgtttggtacacttttgactagcgaggcttggcgtgtcagcgtatctattcaaaagtcgttaatggctgcggatcaagaaaaagttggaatagaaacagaatacccgcgaaattcaggcccggttgccatgtcctacacgccgaaataaacgaccaaattagtagaaaaataaaaactgactcggatacttacgtcacgtcttgcgcactgatttgaaaaatctcaatataaacaaagacggccacaagaaaaaaccaaaacaccgatattcattaatcttatctagtttctcaaaaaaattcatatcttccacacgtggatccgtcgagtctaccatgagcccagaacgacgcccggccgacatccgccgtgccaccgaggcggacatgccggcggtctgcaccatcgtcaaccactacatcgagacaagcacggtcaacttccgtaccgagccgcaggaaccgcaggagtggacggacgacctcgtccgtctgcgggagcgctatccctggctcgtcgccgaggtggacggcgaggtcgccggcatcgcctacgcgggcccctggaaggcacgcaacgcctacgactggacggccgagtcgaccgtgtacgtctccccccgccaccagcggacgggactgggctccacgctctacacccacctgctgaagtccctggaggcacagggcttcaagagcgtggtcgctgtcatcgggctgcccaacgacccgagcgtgcgcatgcacgaggcgctcggatatgccccccgcggcatgctgcgggcggccggcttcaagcacgggaactggcatgacgtgggtttctggcagctggacttcagcctgccggtaccgccccgtccggtcctgcccgtcaccgagatttgactcgaccggcatgccctgctttaatgagatatgcgagacgcctatgatcgcatgatatttgctttcaattctgttgtgcacgttgtaaaaaacctgagcatgtgtagctcagatccttaccgccggtttcggttcattctaatgaatatatcacccgttactatcgtatttttatgaataatattctccgttcaatttactgattgtccaagcttaatgtgagttagctcactcattaggcaccccaggctttacactttatgcttccggctcgtatgttgtgtggaattgtgagcggataacaatttcacacaggaaacagctatgacatgattacgaattcgagctcggtacccggggatcctctagagtcgacctgcaggcatgcaagcttggcactggccgtcgttttacaacgtcgtgactgggaaaaccctggcgttacccaacttaatcgccttgcagcacatccccctttcgccagctggcgtaatagcgaagaggcccgcaccgatcgcccttcccaacagttgcgcagcctgaatggcgaatgctagagcagcttgagcttggatcagattgtcgtttcccgccttcagtttaaactatcagtgtttgacaggatatattggcgggtaaacctaagagaaaagagcgtttattagaataacggatatttaaaagggcgtgaaaaggtttatccgttcgtccatttgtatgtgcatgccaaccacagggttcccctcgggatcaaagt

SEQ ID NO: 114 - DNA, 966 bp, Brassica napus
  CDS (1)..(966)
atggatctgcagccagaagaactccagttcttgacgatccctcaactagttcaagaatccatctcaatcaagaaacgatctccaagaaccttctacctcatcaccctctccctcatcttccctctctccttcgccatcctcgctcactccctcttcactcagcccattctctccaagctcgcctcctccgacccacctaactccgatcgctcccgccacgactggaccgtgctcctcatattcgagttcagctacctcatcttcgtcttcgccttctctctcctctcaaccgccgccgtagtcttcaccgttgcttctctctacaccggcaaaactgtctccttctcctacaccatctccgccatccccaaagtctttaaacgcctcttgatcactttcctttgggttgcactcttgatgttcgcttacaacgctgtcttctttgttttcctagtgatactattcatagctctagacatgaacagtgtaggcttagcggtcatcgctggagttataatctctgttctttactttgttgttcatgtctatttcactgccttatggcatctaggtagtgtgatctctgttcttgagcctgtttatggacttgctgccatgagaaaagcttatgagcttcttaaggggaaggctaagatggctatggggttggtctttgtttacctttttgtctgtgcattaattggaggtacttttggatcgattgtggttcatggaggaggaaagtttgggactttgactaggacccttgttggtgggttgcttgttggtgttcttgtgatggtgaatttggtgggtttgttggttcagagtgtgttttattacgtttgcaagagttatcatcatcagactattgataagacggctttgtatgatcatcttggtgggtatcttggagattatgtgcctcttaagagcaacattcagttggagaatttagacatgtga

SEQ ID NO: 115 - protein, 321 aa, Brassica napus
MDLQPEELQFLTIPQLVQESISIKKRSPRTFYLITLSLIFPLSFAILAHSLFTQPILSKLASSDPPNSDRSRHDWTVLLIFEFSYLIFVFAFSLLSTAAVVFTVASLYTGKTVSFSYTISAIPKVFKRLLITFLWVALLMFAYNAVFFVFLVILFIALDMNSVGLAVIAGVIISVLYFVVHVYFTALWHLGSVISVLEPVYGLAAMRKAYELLKGKAKMAMGLVFVYLFVCALIGGTFGSIVVHGGGKFGTLTRTLVGGLLVGVLVMVNLVGLLVQSVFYYVCKSYHHQTIDKTALYDHLGGYLGDYVPLKSNIQLENLDM

SEQ ID NO: 116 - DNA, 654 bp, Brassica napus
  CDS (1)..(654)
atggcgaatagagtggatcaggaatacgattatttgtttaagatcgtgttgatcggagactcgggtgtggggaaatcgaacatattgtccagattcacgaggaacgagttttgcttggaatccaaatccaccatcggtgtcgaattcgccaccaggactactcaggtggaaggaaagacgatcaaagctcagatctgggatactgcaggtcaggagaggtacagagctatcactagcgcttactaccgaggcgcagtgggtgccctccttgtctacgacatcaccaagaggcagacctttgacaatgccttgaggtggctccgcgaactcagagaccatgctgattccaacatcgtcatcatgatggctggcaacaaatccgatcttaaccacttgagatccgttgctgaggaagacggtcacaatctggccgagaaggaaggtctctctttcctggagacttctgctctcgaagcaacaaacgtcgagaaagcctttcagaccatcttaggagagatctaccatatcataagcaaaaaggcactggctgcacaagaagcggctgctgctaactccgccattccagggcaaggaactacgattaacgtcgatgacacatctggaggcgtgaaacgaggctgctgctctacctaa

SEQ ID NO: 117 - protein, 217 aa, Brassica napus
MANRVDQEYDYLFKIVLIGDSGVGKSNILSRFTRNEFCLESKSTIGVEFATRTTQVEGKTIKAQIWDTAGQERYRAITSAYYRGAVGALLVYDITKRQTFDNALRWLRELRDHADSNIVIMMAGNKSDLNHLRSVAEEDGHNLAEKEGLSFLETSALEATNVEKAFQTILGEIYHIISKKALAAQEAAAANSAIPGQGTTINVDDTSGGVKRGCCST

SEQ ID NO: 118 - DNA, 714 bp, Brassica napus
  CDS (1)..(714)
atgaaagcgtcttcttcttatctggtctcccttttatttacctcgaaagacatggctttctcaccaagtacaaaattcaggcaaaaaaacaacacacctgctgctcaaggaaaatgtatcactcgcctgttgctttatcatttctgcgtgaatttgcccctcatgatggcttcctatcctgtcttcaaagccatgggaatgcgaagcagttttcctctaccctcctggaaagaagtgtctgcccagatattgttctacttcatcattgaggattttgttttctattggggacatcggatcttgcactcaaaatggctttacaagaacgtccacagtgtgcatcatgaatatgccacaccgttcggtttgacatcagaatatgctcaccccgcagagattctattcctgggatttgctaccatagttggtccagctctcacaggcccccacctgattacgctctggttatggatggttctgagagtgcttgagacagtggaagcacattgtggctatcatttcccatggagtctctcaaatttccttcctctgtatggaggtgctgacttccatgactaccatcaccgcctcctctacacaaagtctggaaactactcttcaacttttgtgtatatggactggatctttggtaccgataagggctacagaagactcaagtctcttaaagaaaatagcaacttgaaacaaacgtga

SEQ ID NO: 119 - protein, 237 aa, Brassica napus
MKASSSYLVSLLFTSKDMAFSPSTKFRQKNNTPAAQGKCITRLLLYHFCVNLPLMMASYPVFKAMGMRSSFPLPSWKEVSAQILFYFIIEDFVFYWGHRILHSKWLYKNVHSVHHEYATPFGLTSEYAHPAEILFLGFATIVGPALTGPHLITLWLWMVLRVLETVEAHCGYHFPWSLSNFLPLYGGADFHDYHHRLLYTKSGNYSSTFVYMDWIFGTDKGYRRLKSLKENSNLKQT

SEQ ID NO: 120 - DNA, 1122 bp, Brassica napus
  CDS (1)..(1122)
atgaagatgaacctttattcttccgtttcttttatcttcttcaccttaatcgctcttcaatgtccacctctcaccattcagcaaactacggattcatgcagttcaactctaccgctcaacgacctcaccttcaactcaagcctccttcaatgcgtcgaagcatggactccacagaactacatccttcgatatgcaagaacgttagagaacacatggagcttcatcttatcggctccagactccaacgtcttcatcgggatcggattctccaccaacggtcagatgatcggatccagtgccgtggtcgggtggttacctcccggaagcggaggaggaggacaggcgaaacaatactttctcggaggacagtctccgggagaagtaacgcctgaccaaggagacttagtgatcgtcaacggttctttaaagatcgagtcagtgtcgtcgcgtctttacatgagttttaagttgacggctgagctgccgcggcagagcattctttacgctaagggacctgccggattcttcccgtcttcgccggggtttaggttgagggagcaccaagccatgaccaccaccaccatcaattataatacaggttcgcaaagtgtggttaagggttcaccacactctaagctaaggaagacacatgggctaatgaacatgactggttggggaatactaatcatcattggcgccatagttgctcgacacatgaagcaatgggagccgacttggttctattctcatatcgctgtccagatcactggctttctcctaggcttaactggtatcatttgcggtttgattcttgaaaaccgaaccaacgctagtaatgtttccacgcacaaagcccttgggataacaatactcgtcatgggtggtctccaggtactagcgttgcttgctcgaccggacaaagaatcgaaatacaggaaatattggaactggtatcatcacaacataggaagagctttgataatactcgctatttctaacatcttctatggtattcatttggctaaagctggctcttcttggaacgctggttacggttctgcggttggtgtcttggctttggctgctactggattagaagttagaaagctaatgaacaaatga

SEQ ID NO: 121 - protein, 373 aa, Brassica napus
MKMNLYSSVSFIFFTLIALQCPPLTIQQTTDSCSSTLPLNDLTFNSSLLQCVEAWTPQNYILRYARTLENTWSFILSAPDSNVFIGIGFSTNGQMIGSSAVVGWLPPGSGGGGQAKQYFLGGQSPGEVTPDQGDLVIVNGSLKIESVSSRLYMSFKLTAELPRQSILYAKGPAGFFPSSPGFRLREHQAMTTTTINYNTGSQSVVKGSPHSKLRKTHGLMNMTGWGILIIIGAIVARHMKQWEPTWFYSHIAVQITGFLLGLTGIICGLILENRTNASNVSTHKALGITILVMGGLQVLALLARPDKESKYRKYWNWYHHNIGRALIILAISNIFYGIHLAKAGSSWNAGYGSAVGVLALAATGLEVRKLMNK

SEQ ID NO: 122 - DNA, 654 bp, Brassica napus
  CDS (1)..(654)
atgaacactccagtcatacatatattattgtttctcttcgtagctgccaccgcaacggcagccgctacaccaaccaaacgcgcaaactaccttttcacacggcacgcaaaagcagtcgcgggaatatgcactgtaatccaaacaaacacaagtctatgctgcaaaacccttaaacacgttcctaccaatgatcccattgaattgatccgagcgttagcggttgcggctgaatcttccgtgaaaaatagtgtggcttttctctcagaaatcaaaccaaaacatacatcaaacgcaaccgcagctgcagcgatcatcagctgcgggaaaaacttgaaatacgcattggaagatttcaccgagttttggaaagctacggggaaagatgtaaagacgttggctcataactatttcacgtgtaagaagacgctaatgtcgattatggggtaccattggacttgttttgatgatattgaagataagagtttgttgaaggaaatggagattgggattggagttgggaagaatctaagcagtgattcgtatgatgtgttcaatggtttaaatactatttttaagacttttggtattaaggtgaagctgaacgaggaagacacttcgccccgaccgccaccattgtcggcttattactactga

SEQ ID NO: 123 - protein, 217 aa, Brassica napus
MNTPVIHILLFLFVAATATAAATPTKRANYLFTRHAKAVAGICTVIQTNTSLCCKTLKHVPTNDPIELIRALAVAAESSVKNSVAFLSEIKPKHTSNATAAAAIISCGKNLKYALEDFTEFWKATGKDVKTLAHNYFTCKKTLMSIMGYHWTCFDDIEDKSLLKEMEIGIGVGKNLSSDSYDVFNGLNTIFKTFGIKVKLNEEDTSPRPPPLSAYYY

SEQ ID NO: 124 - DNA, 648 bp, Brassica napus
  CDS (1)..(648)
atgaacattgcaatcaaactagcctttctcttcttaaccgtcacctcaaccgtaaccgctacaccagccaaacgcccagactacctttccacacagcatgcaaaaacaatcgcgggaatatgcaccgttatccaaacagacacaagtctatgcaccaaaacccttaaagaagttcctagcgatgaccccatcacattaatccgagcattacctactgcggctgaatcatccgttaaaaaaagcgtgactttcctcattggaatcaaaccaaaacatacatcaaacgcagtcgcaactgcagcgatcaacagctgcgagaaaaacttgaataacgcgttagaagatttcgctgagttttggaaagctacggggaaagatgtaacgacgttggctcataactatttcacgtgtaagaaaacgttaacgtcgatcatggggtatcattcgacttgtttggatgatattaaagataagaatctgttgaaggaagtggagagtgggattggagttgggaagaatctaagcagtaactcgtttgatgtttttaatggtttgcatactattttcaatacttttgctattaatgtgaagcttaacgaggaagacacttcgccccgaccgccaccattgtccgattattattactga

SEQ ID NO: 125 - protein, 215 aa, Brassica napus
MNIAIKLAFLFLTVTSTVTATPAKRPDYLSTQHAKTIAGICTVIQTDTSLCTKTLKEVPSDDPITLIRALPTAAESSVKKSVTFLIGIKPKHTSNAVATAAINSCEKNLNNALEDFAEFWKATGKDVTTLAHNYFTCKKTLTSIMGYHSTCLDDIKDKNLLKEVESGIGVGKNLSSNSFDVFNGLHTIFNTFAINVKLNEEDTSPRPPPLSDYYY

SEQ ID NO: 126 - DNA, 771 bp, Brassica napus
  CDS (1)..(771)
atggttggaccgtcgcggcctcagatcgttctttttggatcatccatcgtccagatgagctttggtcatggtggttggggtgctattctctccgaggtctatgctcgcaaggccgacatcattctgcgaggatattatggatggaactcaactcgtgctttggaggttgttgacaaagtgttccccaaggatgccgttgtacaaccttctcttgtagtcgtctattttggaggaaacgactcaatgggacctcatccttctggtctaggacctcacgtgccactaactcaatacgttgataacatgaagaagatcgctcttcatcttcagagtctttcagactcaactcgtatcatatttctaagttgccctccagtggacgaagccaaagttcgtcaaaaccagagcccatacttgagcgaggtaatccgcacaaacgagctatgcaagacatattcagacgcttgtgtagagctatgcaaagagctcgacttacaagtagtggatctcttctctactcttcagaaagcagatgactgggaaaccgtttgcttcacagatgggattcatttgtcagcacaaggaagcaagctggtggccgcagagatactgagagttgttaaggaagcggagtggagaccgtctcttcactggaaatcgatgccaacagaattctcagaggactctccttatgatcttgttgcagcagatggcaaaacgacgttgaactcttcggagtggacgtacttctgggaagaacaatgggagtaa

SEQ ID NO: 127 - protein, 256 aa, Brassica napus
MVGPSRPQIVLFGSSIVQMSFGHGGWGAILSEVYARKADIILRGYYGWNSTRALEVVDKVFPKDAVVQPSLVVVYFGGNDSMGPHPSGLGPHVPLTQYVDNMKKIALHLQSLSDSTRIIFLSCPPVDEAKVRQNQSPYLSEVIRTNELCKTYSDACVELCKELDLQVVDLFSTLQKADDWETVCFTDGIHLSAQGSKLVAAEILRVVKEAEWRPSLHWKSMPTEFSEDSPYDLVAADGKTTLNSSEWTYFWEEQWE

SEQ ID NO: 128 - DNA, 1233 bp, Brassica napus
  CDS (1)..(1233)
atgcaaacagtgagagctttgaggagagtcactaaaccctcacaatgggttcggtctgtttcccaaggaaaaagaagcttctccgccctaccaaacttctccgcttcagatgccgatgtccaagaccaggtttcggttgaagggaaagctaaatcaagagccgccattctcgatagaccctcttcactcaatgctctttctgctcccatggttggtcggttgaagaggctatacgagtcatgggaagagaaccctgctatttcgtttgttttgatgaagggtagcggaaaaacgttctgttctggtgcagatgtcttgcctctttatcactcgatcaatgaagggaatactgaagaatgtaaacactttttcgggagcttgtacaattttgtatacctccaaggaacatatttgaaaccaaatatagctataatggatggtgtaacaatgggttgtggtggtggcatttcaattccagggatgtttcgtgtggcaacagataaaactgtgttggcacatccagaggttcaaattggttttcatcctgatgctggagcttcttattacctttcacggcttcctggctatttaggggaatacttggctctaacagggcagaaacttgatggagtcaaaatgatagcatgtggccttgccacccacttttgcctacactcgagacttgggatggtcgaagagaggattggtaagctgttgacagatgatccaactgtcattgaggcttctcttgctcaatacagtgatctagtttatcctgacaataccagtgtacttcacaagatcgagatgattgatagatactttgggcttgacacggttgaagaaatcattgaggctatggaaaacgaggttgctgattctggcaatgaatggtgcaagaaaactctcaaacaagtcaaagaagcttctcctttgagcttaaagattactttacaatctatacgagaaggtagatttcaaactcttgatcagtgtctcacgcgtgagtaccgtatctctctctgtggagtctcaaagactgtctctggtgacttctgcgagggtattcgagcccgtttggtggataaagactttgctccaaagtgggatcctccgcgcctagaagatgtaagcaaagacatggtggactgctacttctcgccagccacagatgccgatgattcagaatctgagctgaagcttccaacagctcaacgagagccttacttctga

SEQ ID NO: 129 - protein, 410 aa, Brassica napus
MQTVRALRRVTKPSQWVRSVSQGKRSFSALPNFSASDADVQDQVSVEGKAKSRAAILDRPSSLNALSAPMVGRLKRLYESWEENPAISFVLMKGSGKTFCSGADVLPLYHSINEGNTEECKHFFGSLYNFVYLQGTYLKPNIAIMDGVTMGCGGGISIPGMFRVATDKTVLAHPEVQIGFHPDAGASYYLSRLPGYLGEYLALTGQKLDGVKMIACGLATHFCLHSRLGMVEERIGKLLTDDPTVIEASLAQYSDLVYPDNTSVLHKIEMIDRYFGLDTVEEIIEAMENEVADSGNEWCKKTLKQVKEASPLSLKITLQSIREGRFQTLDQCLTREYRISLCGVSKTVSGDFCEGIRARLVDKDFAPKWDPPRLEDVSKDMVDCYFSPATDADDSESELKLPTAQREPYF

SEQ ID NO: 130 - DNA, 651 bp, Brassica napus
  CDS (1)..(651)
atggcgaatcgaatagaccatgagtacgattacttgttcaagatcgtcctcatcggcgactccggtgtcggcaaatccaacatcctctccagattcacccgaaacgagttctgcctcgaatccaaatccaccatcggcgttgaattcgccaccaggactctacaggttgaaggcaaaacagtgaaggctcagatttgggacacggcagggcaagagcgttaccgagccatcacgagcgcttactacagaggagccgtcggtgctctcctcgtctacgacatcaccaagagacaaaccttcgagaacgtcctgaggtggctacgcgagcttagggaccatgccgattccaacattgtgatcatgatggctgggaacaaatcagatctaaaccacctgagatccgttgccgacgaagatggtcggtctctagctgagaaggaaggtttgtcgtttctcgagacgtctgctttggaggcgagtaacatcgagaaagcgtttcagacgattttatctgagatttatcatatcataagcaagaaggcgttggcggcgcaagaagctgcgggtaatcttcaggttccggggcaaggtactgccattaacataacggattcgtctgtggctaagagtaaaggatgctgttctacctag

SEQ ID NO: 131 - protein, 216 aa, Brassica napus
MANRIDHEYDYLFKIVLIGDSGVGKSNILSRFTRNEFCLESKSTIGVEFATRTLQVEGKTVKAQIWDTAGQERYRAITSAYYRGAVGALLVYDITKRQTFENVLRWLRELRDHADSNIVIMMAGNKSDLNHLRSVADEDGRSLAEKEGLSFLETSALEASNIEKAFQTILSEIYHIISKKALAAQEAAGNLQVPGQGTAINITDSSVAKSKGCCST

SEQ ID NO: 132 - DNA, 651 bp, Glycine max
  CDS (1)..(651)
atggcgcatcgagtggaccacgagtatgactatctgttcaagatcgttttgatcggagactcaggtgtaggaaaatctaacatcctctccaggttcactcgaaacgagttctgtttagagtccaaatccactatcggagttgagttcgccaccagaactcttcaggtagagggaaagactgtgaaagcacagatctgggacacagcaggtcaagagcggtaccgtgccattaccagtgcttattacagaggagctgttggagctctactcgtatatgacataaccaagaggcaaacctttgacaatgtccaaaggtggttgcgtgaactgagggaccatgcagactctaatatagttatcatgatggctggaaataaatctgatttgagccatcttagagcggtttcagaggatgatggtcaagcattggcagagagggaaggtctctcgtttcttgagacatctgcactggaagcaaccaacattgagaaggcattccaaaccattttgacagagatttatcatattgttagcaaaaaggcacttgcggctcaggaagcagctgttggtaccacacttcctggtcaaggtaccaccatcaatgttggggatgcatctgggaatacaaagagaggctgctgctccacttaa

SEQ ID NO: 133 - protein, 216 aa, Glycine max
MAHRVDHEYDYLFKIVLIGDSGVGKSNILSRFTRNEFCLESKSTIGVEFATRTLQVEGKTVKAQIWDTAGQERYRAITSAYYRGAVGALLVYDITKRQTFDNVQRWLRELRDHADSNIVIMMAGNKSDLSHLRAVSEDDGQALAEREGLSFLETSALEATNIEKAFQTILTEIYHIVSKKALAAQEAAVGTTLPGQGTTINVGDASGNTKRGCCST

SEQ ID NO: 134 - DNA, 894 bp, Glycine max
  CDS (1)..(894)
atgctcccctacgcttccatcccggaggccgtggcggcgctgggccgcaacctcaccttcgcggagaccctctggttcaactactccgccgccaagtccgattacttcctctactgccacaacattctgttcctcttcctcgtcttctccctcgtccccctccccctcgtcttcctcgaattcaagcgcttctccttcgtctcttcccacaagatccaaccaaaagtccgcttgtccctggccgaaaccttcaagtgctacaaagacgtcatgcgcatgttcttcctcgtcgtcggccccctccaactcatctcttacccttccatccagatgattgggatcaggacgggcttgccattaccttcgtggcgggagatcctctcgcagcttctggtgtactttctcgtagaggattacaccaattactggatccacaggtttctgcacaacgattgggggtacgagaagattcaccgcgtccaccacgagtaccatgcgcccattggattcgccgcgccctatgcccactgggccgagatcttgatcctcgggattccctcctttcttgggcctgccatggttcctggccacattatcaccttctggctctggatagccttgcgccagattgaagccattgacacgcacagcgggtatgactttcctaggagtatcacaaaatatattccattttatggtggtgctgagtatcatgattaccatcattacgttggaagacaaagccaaagcaattttgcttcagttttcacatactgtgattacatctatggaactgacaaggggtataggtatcagaaaaaaatacttcagaagttgaaggaagagttggcaaatggtgttgagcagaacggaggattatacaagactgactga

SEQ ID NO: 135 - protein, 297 aa, Glycine max
MLPYASIPEAVAALGRNLTFAETLWFNYSAAKSDYFLYCHNILFLFLVFSLVPLPLVFLEFKRFSFVSSHKIQPKVRLSLAETFKCYKDVMRMFFLVVGPLQLISYPSIQMIGIRTGLPLPSWREILSQLLVYFLVEDYTNYWIHRFLHNDWGYEKIHRVHHEYHAPIGFAAPYAHWAEILILGIPSFLGPAMVPGHIITFWLWIALRQIEAIDTHSGYDFPRSITKYIPFYGGAEYHDYHHYVGRQSQSNFASVFTYCDYIYGTDKGYRYQKKILQKLKEELANGVEQNGGLYKTD

SEQ ID NO: 136 - DNA, 999 bp, Glycine max
  CDS (1)..(999)
atggacagagaacaagaagagatgcaatttcttgggttctttgacatatacaaagaagcctctaagatcatactttcatggaggaaaatcttcacccaaatcacctcaacactaatcctgcctctctccttcatcttcctaatccacatggaaatctccaacctccttttcaggaagatcctcatcaacgaaatagtcatggacgaaacaaggcgtaacacaccccaatacaacaagcttgaccgcatgatctcttctgaattgatcactcttgtgctcttcaaaatcgcatacttcactcttcttctcatattctctctcctttctacctcggcagtagtctacaccatcgcatcaatctacaccgcaaaagaagtgacattcaagagggtcatgagtgttgtccctaaggtgtggaaaaggttaatgttgacctttctatgtgcctttgctgcttttttcatttacaatatcgtgaccatgttggttatgttcttgtcaatagtcacaatagggataagtagtggtggggttgtggttttggttttgataacggttttgtacttcattgggtttgtgtacctcaccgtggtgtggcagctagcaagtgttgtgaccgtgttggaggactcgtgggggattcgagccatggccaagagcaaggagttgataaaggggaagatggttttatccatattcgtctttttcacccttgtggcttcttttgtttccattagggttttgttcaaggtgatggtggttgatggatggagggtgagttctgtggacaaaacagcatatggggttctctgtttcttgctcttgtcttgtttgttcctctttgggcttgttcttcaaactgtgctctactttgtttgcaagtcctatcaccatgagaatattgacaaatcggctttggcagatcatcttgaagggtatagaggagagtatgttccattgacagctaaggatgttcagctggagcaataccaagtttga

SEQ ID NO: 137 - protein, 332 aa, Glycine max
MDREQEEMQFLGFFDIYKEASKIILSWRKIFTQITSTLILPLSFIFLIHMEISNLLFRKILINEIVMDETRRNTPQYNKLDRMISSELITLVLFKIAYFTLLLIFSLLSTSAVVYTIASIYTAKEVTFKRVMSVVPKVWKRLMLTFLCAFAAFFIYNIVTMLVMFLSIVTIGISSGGVVVLVLITVLYFIGFVYLTVVWQLASVVTVLEDSWGIRAMAKSKELIKGKMVLSIFVFFTLVASFVSIRVLFKVMVVDGWRVSSVDKTAYGVLCFLLLSCLFLFGLVLQTVLYFVCKSYHHENIDKSALADHLEGYRGEYVPLTAKDVQLEQYQV

SEQ ID NO: 138 - DNA, 768 bp, Glycine max
  CDS (1)..(768)
atggtgggaccagtgaggcctcagtttgtgctctttggctcttccattgttcagctcagtttttctctccaaggttggggtgctattcttgctcacttgtatgctcgcaaggccgatataattctgcgaggatactctggttggaattcaaggcgtgctgtgcaagttctggatgaaattttcccaaagaatgccactgagcaaccagaattgataattgtgtactttggtggtaatgattctcttcttccgcatccaagtggccttggtcaacatgtacctctgcaagaatacattgaaaatatgagaaagattgctatccatctgaagagcctttcaaagaagactcgccttatatttctcggtgctcctcctgtcaatgaggcacaaatttatggaaccagtgtgctacaagggcagcgattaaggaacaatgaatcttgtcgaatatattcagaagcatgtttggagctgtgccgtgagatgaacatcatggcaattgatctgtggtctgcactccagaaaagggttgactggagagaagtttgcttcacggatggaattcatcttacttctgaggggagcaatatagtggcaaaagaggtattgaaggtcatcaaagaagcaaactgggaaccttgcctgcactggaggtcaatgccaactgaatatggagaagattcaccttatgatcctgttggccctgatggaaagacaagtttaaatatctccaactggaccttccttgaaaccaaggaatgggactag

SEQ ID NO: 139 - protein, 255 aa, Glycine max
MVGPVRPQFVLFGSSIVQLSFSLQGWGAILAHLYARKADIILRGYSGWNSRRAVQVLDEIFPKNATEQPELIIVYFGGNDSLLPHPSGLGQHVPLQEYIENMRKIAIHLKSLSKKTRLIFLGAPPVNEAQIYGTSVLQGQRLRNNESCRIYSEACLELCREMNIMAIDLWSALQKRVDWREVCFTDGIHLTSEGSNIVAKEVLKVIKEANWEPCLHWRSMPTEYGEDSPYDPVGPDGKTSLNISNWTFLETKEWD

SEQ ID NO: 140 - DNA, 684 bp, Glycine max
  CDS (1)..(684)
atggtgagggagaagattcagattaagaagatcgacaacgccacggcgaggcaggtcacgttctccaagcgtcgcagagggctcttcaagaaagctgaggagctttcggttatgtgtgatgctgatgttgccctcataatcttctcttccactgggaagctctttgagtactcaagctcaagcatgaaggaaatacttgaaaggcatcatttgcactcaaagaacctagcaaggatggaacaaccatctctcgagttgcagctagttgaaaacagcaattgctctagattgagcaaggaagtggctgaaaagagccatcaactaaggcagctgagaggagaggatcttcaaggcttaaacatagaagaattgcaacaattggagaggtctcttgaaactggattgggccgtgtaatagaaaagaagggtgagaagattatgagtgagatcactgatctccaaagaaaggggatgctattgatggaagagaacgagcgacttaaacgtcacgtggcgggcataattaatggccaaaggcatggtggtgccgaatctgagaactttgttatggatgaaggtcagtcttcagagtctgttacgtacgtttgcaattccactggacccccccaagactttgaaagctcagatacttccctcaaattggggctaccatactccggctga

SEQ ID NO: 141 - protein, 227 aa, Glycine max
MVREKIQIKKIDNATARQVTFSKRRRGLFKKAEELSVMCDADVALIIFSSTGKLFEYSSSSMKEILERHHLHSKNLARMEQPSLELQLVENSNCSRLSKEVAEKSHQLRQLRGEDLQGLNIEELQQLERSLETGLGRVIEKKGEKIMSEITDLQRKGMLLMEENERLKRHVAGIINGQRHGGAESENFVMDEGQSSESVTYVCNSTGPPQDFESSDTSLKLGLPYSG

SEQ ID NO: 142 - DNA, 777 bp, Glycine max
  CDS (1)..(777)
atggcagctgcaacatctagtgctgtgttaaacgggtttggatctcacttcttgtgtggaggaaagaggagccatgcccttcttgctgctagcattggagggaaagttggtgcttctgttagtcctaaaagagttattgtggcagttgctgctgcaccaaagaagtcatggatccccgctgtaaaaggtggtgggagtttcatagacccagaatggcttgatggctcgctaccaggtgactatggttttgacccactaggactaggaaaggacccggcattcctgaaatggtatagagaagctgaactcattcatgggaggtgggcaatggctgcagttgtaggcatcttcattgggcaggcatggagtggagttccatggtttgaggctggagcagatcctaatgcaattgctcctttctcatttggctctctcttaggtacccagttgctcctaatggggtgggttgagagcaagagatgggtggacttcttcaacccagattctcagtcagtggagtgggccactccatggtcaaaaactgctgagaactttggcaactctactggtgaacaaggctaccctggaggaaaattctttgaccctttgggatttgctggagctatcaaggatggcgtttacattccggatgccgacaagctagagagactgaaattggctgagattaagcatgctaggattgctatgttggctatgctgattttctactttgaggctggccagggcaagacaccccttggtgctcttggcttgtaa

SEQ ID NO: 143 - protein, 258 aa, Glycine max
MAAATSSAVLNGFGSHFLCGGKRSHALLAASIGGKVGASVSPKRVIVAVAAAPKKSWIPAVKGGGSFIDPEWLDGSLPGDYGFDPLGLGKDPAFLKWYREAELIHGRWAMAAVVGIFIGQAWSGVPWFEAGADPNAIAPFSFGSLLGTQLLLMGWVESKRWVDFFNPDSQSVEWATPWSKTAENFGNSTGEQGYPGGKFFDPLGFAGAIKDGVYIPDADKLERLKLAEIKHARIAMLAMLIFYFEAGQGKTPLGALGL

SEQ ID NO: 144 - DNA, 816 bp, Glycine max
  CDS (1)..(816)
atggcgtccctcatcgaatctggctggcagtacttgatcacacatttcagtgactttcaactggcgtgtttgggaagtttctttctacatgaaggcgttttcttcttgtctggacttccctttatatggcttgagagggcagggtggatgagcaagtacaaaattcaggccaaaaataacacccctgcagctcaggagaaatgtattgttcgtctgttgctttaccattttggtgtcaatctacctgttatgattttttcatatcctgtcttcacatacatgggcatgcggagtagtcttcccctaccgtcctggaaagtagttctaattcaaataatcttttacttcattttggaggactttatattctactggggacatagaatactgcacacaaagtggttatacaagcatgtgcacagtgttcatcatgagtatgctacaccgtttggattgacttctgaatatgctcatcctgctgagatacttttccttgggtttgctaccatttttggtcctgccattactgggccccacttgataactctctggttatggatggttctgagagtcctagagacagttgaggctcattgtggttaccatttcccatggagtctttccaacttccttccattgtatggaggagctgatttccatgactatcatcaccgtttattgtacaccaagtctgggaactattcatcaacttttacttacatggaccggatatttgggactgatataggctacagaaagttgaaagcattgaagagcataggagttgaagacagtagcgagcaaaagaaacaataa

SEQ ID NO: 145 - protein, 271 aa, Glycine max
MASLIESGWQYLITHFSDFQLACLGSFFLHEGVFFLSGLPFIWLERAGWMSKYKIQAKNNTPAAQEKCIVRLLLYHFGVNLPVMIFSYPVFTYMGMRSSLPLPSWKVVLIQIIFYFILEDFIFYWGHRILHTKWLYKHVHSVHHEYATPFGLTSEYAHPAEILFLGFATIFGPAITGPHLITLWLWMVLRVLETVEAHCGYHFPWSLSNFLPLYGGADFHDYHHRLLYTKSGNYSSTFTYMDRIFGTDIGYRKLKALKSIGVEDSSEQKKQ

SEQ ID NO: 146 - DNA, 651 bp, Glycine max
  CDS (1)..(651)
atggcgcatcgagtagaccacgagtatgactatctgttcaagatcgttttgatcggagactcaggtgtaggcaaatccaacatcctctccaggttcactcgaaacgagttctgtttggagtccaaatccactatcggagttgagttcgccaccagaactcttcaggtagagggtaaaactgtgaaagcacagatctgggacacagcaggtcaagagcggtaccgtgccattaccagtgcttattacagaggagctgttggtgctctacttgtatatgacataaccaagaggcaaacctttgacaatgtccaaaggtggttgcgtgaactgagggaccatgcggattctaatatagttatcatgatggctggaaataaatctgatttgagccatcttagagcagtttcggaggatgatggtcaagcattggcagagagggaaggtctctcgtttcttgagacatctgcactggaagcaaccaacattgagaaggcattccaaaccattttgacagagatttatcatattgttagcaaaaaggcgctggctgctcaggaagcagctgttggtaccatacttcctggtcaaggtaccaccatcaatgttggggatgcatctgggaatacaaagagaggctgctgctccacttaa

SEQ ID NO: 147 - protein, 216 aa, Glycine max
MAHRVDHEYDYLFKIVLIGDSGVGKSNILSRFTRNEFCLESKSTIGVEFATRTLQVEGKTVKAQIWDTAGQERYRAITSAYYRGAVGALLVYDITKRQTFDNVQRWLRELRDHADSNIVIMMAGNKSDLSHLRAVSEDDGQALAEREGLSFLETSALEATNIEKAFQTILTEIYHIVSKKALAAQEAAVGTILPGQGTTINVGDASGNTKRGCCST

SEQ ID NO: 148 - DNA, 762 bp, Glycine max
  CDS (1)..(762)
atgccaggatcattgaggcctcggtttgttatctttggttcttccatcgttcaatttggtttttatgatgaaggttgggtggctattctttctcatttgtatgcccgcaaggttgatattgatttgcgaggatatgctggttggaattcaaggcgtgctgtgcaggttctggataaagtttttcccaaggatgcccctatacaaccttcattggttattgtctactttggtggtaatgattcttctgctcccctctcatctggcctaggtcctcatgtgcctctccaagaatacattgaaaatttgaggaagatcgttgaccatctcaagagcctctcagagaacactcgcattctacttctcagtactcctcccctcaatgatgcagcaattacgccaaacagtgatgggaagccaacaaagacatatgaagcttgtcaaatatattcagaagcatgtttggatgtgtgccgcaagatgaatatcaaggccattgatttgtggtctgctattcagaaaagagataactggcaagatgtttgcttcattgatggaattcacctctcatctgagggaagcaagatagtgttgaaagagatactgaatgtcctcaaaggtgcagaatgggaacctagtctatattggaaatcaatgccaagtgagtttgatgaagattcaccatatgatccagttacaactgatggaaagtcaactattaatctttccagctgggtcttccctgacaatgacaaatgggactag

SEQ ID NO: 149 - protein, 253 aa, Glycine max
MPGSLRPRFVIFGSSIVQFGFYDEGWVAILSHLYARKVDIDLRGYAGWNSRRAVQVLDKVFPKDAPIQPSLVIVYFGGNDSSAPLSSGLGPHVPLQEYIENLRKIVDHLKSLSENTRILLLSTPPLNDAAITPNSDGKPTKTYEACQIYSEACLDVCRKMNIKAIDLWSAIQKRDNWQDVCFIDGIHLSSEGSKIVLKEILNVLKGAEWEPSLYWKSMPSEFDEDSPYDPVTTDGKSTINLSSWVFPDNDKWD

SEQ ID NO: 150 - DNA, 771 bp, Glycine max
  CDS (1)..(771)
atggctggcccaattatgagacctcagattgtgctatttggctcctccataattcaaatgagcttcgacaatggtggttggggtgctattctagctaacttgtacgctaggaaggcggacatcatcttaagaggatactctggttggaattcaaggcgggctttggaggttttggatgaaattttccccaaggatgcttatgtgcaaccatcattggtaattgtgtattttggtggcaatgattctattgatcctcacccatctggccttggtcctcatgtaccccttgaagaatatgttgaaaacatgaggaaaattgctaatcatcttaagagcctctcggaccatattcgcattatatttctcacttctcctccgatcaatgaagaactaatccgcaaaaagctcagtgcaacgcaatcaggaagaaccaatgaatcctgtggagagtatgcagatgggttaatggagctttgtgaggagatgaatatcaaggccattaatctgtggtctgcaattcagacaagagaggattggttagacgttagcttcacggatggagttcatctatcagcagagggaagcaaggtagtggtgaaggaaatattaaaggttctaagagaagtagattggaaacctagtctgcattggatgtcaatgccaactgaatatgcagaagattcaccatattatcctccaagtcctgatggaacaacaaccataaatgtgtctcatattatctcccgaaggtgtttgcagtgggatatatag

SEQ ID NO: 151 - protein, 256 aa, Glycine max
MAGPIMRPQIVLFGSSIIQMSFDNGGWGAILANLYARKADIILRGYSGWNSRRALEVLDEIFPKDAYVQPSLVIVYFGGNDSIDPHPSGLGPHVPLEEYVENMRKIANHLKSLSDHIRIIFLTSPPINEELIRKKLSATQSGRTNESCGEYADGLMELCEEMNIKAINLWSAIQTREDWLDVSFTDGVHLSAEGSKVVVKEILKVLREVDWKPSLHWMSMPTEYAEDSPYYPPSPDGTTTINVSHIISRRCLQWDI

SEQ ID NO: 152 - DNA, 1224 bp, Glycine max
  CDS (1)..(1224)
atgcagagattcaaagctctgctacctcaacaaactaggtcctcacttcgcactctctgttctcaccgtcgagctttctccgctcaaccgaattacgcaaagcaccacgacgacgattctcaggaacagattttagtcgaaggaagagcgaaatcacgagcagctattctcaacaggccgtcttcgctgaactcgctcaatgcttcaatggttgctcggttgaagaggctgtatgattcctgggaagaaaactctgatattggctttgttttgatgaagggtagtggcagagctttctgttctggtgcagatgttgttaggctgtatcactcactcaatgaaggaaatactgacgaagctgaacagtttttcaaaacattatattcatttgtatatcttcaagggacatatcttaaaccacatgttgccattttggatggaataacaatgggatgtggatctggaatttctctaccaggaatgttccgtgtggtaactgataaaactgttttttctcacccagaagctcaaataggtttccacccagatgcaggagcttcttatgttttgtctcgtctacctggctacttaggggaatacttggcccttacaggagataagcttaatggtgttgaaatgattgcctgccgccttgctactcattattcactaaatgcaaggctctctttgcttgaagaacgtcttggtaaactaatcacagacgaaccttctgttgtggagtcatccctcgcacagtatggtgatcttgtttatccagataggagcagtgtccttcacaggattgatactattgatagatgtttcagtcacgaaactgtggaggaaattattgaagctttggagaaagaggctgctgagtctaatgacgaatggtactcgactactctaaggagaataagagaagcctccccgttgagtttgaaagttactttacaatctatacgtgaaggtagatttgaaacacttgataaatgtcttgtacgtgagtatcgcatgtccctacgtggtatttcaaagcatgtctcctctgatttctttgagggtgttcgggcacgaatggttgatagagattttgcaccaaagtgggacccacctagattaaaagatatatcagaggacatggttgaatactatttctctcctttaagtgaagttcaatctgaattagtgctgccaacagctttgcgagaaccttacatgtga

SEQ ID NO: 153 - protein, 407 aa, Glycine max
MQRFKALLPQQTRSSLRTLCSHRRAFSAQPNYAKHHDDDSQEQILVEGRAKSRAAILNRPSSLNSLNASMVARLKRLYDSWEENSDIGFVLMKGSGRAFCSGADVVRLYHSLNEGNTDEAEQFFKTLYSFVYLQGTYLKPHVAILDGITMGCGSGISLPGMFRVVTDKTVFSHPEAQIGFHPDAGASYVLSRLPGYLGEYLALTGDKLNGVEMIACRLATHYSLNARLSLLEERLGKLITDEPSVVESSLAQYGDLVYPDRSSVLHRIDTIDRCFSHETVEEIIEALEKEAAESNDEWYSTTLRRIREASPLSLKVTLQSIREGRFETLDKCLVREYRMSLRGISKHVSSDFFEGVRARMVDRDFAPKWDPPRLKDISEDMVEYYFSPLSEVQSELVLPTALREPYM

SEQ ID NO: 154 - DNA, 1701 bp, Glycine max
  CDS (1)..(1701)
atggtaggagattttcaagtgactatggagaaacagagcagttttcgggcatctacaatggaaaaacagaagagttttcgtggatttatggaaaaacagaaaagttttcgcattgttatggagaagcagctcagcttcatgggaagtgaaaggaagaagaacaaggaatcacctgggaaacgtggtgacttaccaattcatttagcagctcgggcagggaacttgagtagagtgaaagagataattcaaaactattctaataatgagacaaaagatttgttggcaaagcagaacctagagggggagacccctctttatgtcgcttcagagaatgggcatgctttggttgttagtgagatacttaactacttggacctgcaaactgcttctattgcagccagaaatggctatgatccattccatattgctgcaaagcagggtcatcttgaggtgctgagagaactactgcactcctttcccaacttggccatgaccacagatttgtccaactcaactgctttacacacagctgcaactcaaggtcatattgatgtggttaagctccttctggaatcagattctaaccttgctaaaatagccaggaataatggtaaaactgtccttcactctgcggctagaatggggcatttggaagttgtgaaagccttactaaacaaggatccaagcactggatttaggactgataagaaaggtcaaactgccctacacatggctgtgaaagggcaaaatgaagaaattttgctggaattggtaaaacctgacccagcagttttgagtctggaagataataaaggaaatacagcattgcatattgccacaaagaagggccgtactcagaatgttcgctgcttgttatcaatggagtgtatcaacatcaatgctacaaacaaggctggagagactcctcttgatgttgcagaaaaatttggaagtccagaactcgtctccatattgagggatgctggggctgccaattctactgaccaaaggaaacctccaaatccatcaaagcaactcaagcagactgtcagtgacataaagcatgacgtacaatcccaactccaacagacacgtcagactggcatgagggtccagaaaattgcaaagaagctaaaaaagctccacattagtggcctgaacaatgcgataaactctgctactgttgttgccgttcttattgctacagttgcttttgcagccaccttcacagtccctggtcaatacgttgaagacaaaacacatggattttcacttggacaagcaaatatagcaaacaatgcagctttcctaatattttttgtgtttgacagcctggcattgttcatctctctggcagttgtggtggttcaaacctctgtcgttgtgattgagcaaaaggcaaagaagcagctcgtttttgtcattaacaagctcatgtggatggcttgccttttcatttccattgccttcatttctcttacatacgtggtggtgggatcacactccagatggcttgcaatatatgctactgtgattggaagcttgataatgctctctacaattggctccatgtgctattgtgtaattttgcataggatggaggagacaaaattgagggccgagagtcgatcgttctctatgtctcatgcatcagaccaagagattttaaacagtgaatacaagagaatgtacgcactgtag

SEQ ID NO: 155 - protein, 566 aa, Glycine max
MVGDFQVTMEKQSSFRASTMEKQKSFRGFMEKQKSFRIVMEKQLSFMGSERKKNKESPGKRGDLPIHLAARAGNLSRVKEIIQNYSNNETKDLLAKQNLEGETPLYVASENGHALVVSEILNYLDLQTASIAARNGYDPFHIAAKQGHLEVLRELLHSFPNLAMTTDLSNSTALHTAATQGHIDVVKLLLESDSNLAKIARNNGKTVLHSAARMGHLEVVKALLNKDPSTGFRTDKKGQTALHMAVKGQNEEILLELVKPDPAVLSLEDNKGNTALHIATKKGRTQNVRCLLSMECININATNKAGETPLDVAEKFGSPELVSILRDAGAANSTDQRKPPNPSKQLKQTVSDIKHDVQSQLQQTRQTGMRVQKIAKKLKKLHISGLNNAINSATVVAVLIATVAFAATFTVPGQYVEDKTHGFSLGQANIANNAAFLIFFVFDSLALFISLAVVVVQTSVVVIEQKAKKQLVFVINKLMWMACLFISIAFISLTYVVVGSHSRWLAIYATVIGSLIMLSTIGSMCYCVILHRMEETKLRAESRSFSMSHASDQEILNSEYKRMYAL

SEQ ID NO: 156 - DNA, 1209 bp, Glycine max
  CDS (1)..(1209)
atgttgcattgtctcaacacttcctgttcggacatcacagtcttggaaagacaacgggaagcaaccatcaagtgccagaaccaccaaccaccctacttaacggactttaacgccgtcttcccttcttcttcttcttcttcttcttcttcctcttcttcttctcatagtcagggcttgctcatgatgtgctcggattcctcgctcggccaggtcctaactcactccgtcaaacccgatccgggcgtctggcccgaattcggttttctacccgccatttcgagaacttgtagcagagacggagacttggtttcgcccaaggaaaacatggccagtgggaaagaaaatgctaagaagagaaagcctcagaactccaaggttgttgcggagattgataataacaaggacaaggacaagagagtcaaagtaactggcgaggaaggagaatccaaagtaaccgagcaccataccagaaacaagaatgccaaatccaacgcaaataagaacaacagagaaacctctgcggacacttccaaaggctccgaggttcaaaatcagaaaccagactacattcatgtccgagcgcgtcgtggacaagccacggatagtcatagcttagctgaaagagtaaggagggagaagattagcgagagaatgaagtatttgcaagatttaataccgggttgcaacaaagttgcagggaaagctggaatgcttgatgaaattattaactatgttcagtctcttcaacgccaagttgagttcttgtcaatgaaattagcggctgtaaacccaaggcttgacttcaacattgacgaactgtttgccaaagaggtgtttccttcttgtgctcaaagttttccaaacatagggattccctcagatatgagtattagtaacaacccttcgtatcttcagttcaattcagcgcagcaacttgtatcgtgctgtggtggattaataaacagcatgggaataagccctcccaacatgggactccgaacgaacattattagtactagcactgtacctttgcccgaaacttttcttgactcttcctgtttcgctcaaattctaccctcctcaaattgggaaggtggtgatttccaaagcctttacaacgttgcctttgatcaagggcgaacagcatcttttccccctcagccatttacaggtctagttgaagctagcaatctaaaaatggagatgtaa

SEQ ID NO: 157 - protein, 402 aa, Glycine max
MLHCLNTSCSDITVLERQREATIKCQNHQPPYLTDFNAVFPSSSSSSSSSSSSSHSQGLLMMCSDSSLGQVLTHSVKPDPGVWPEFGFLPAISRTCSRDGDLVSPKENMASGKENAKKRKPQNSKVVAEIDNNKDKDKRVKVTGEEGESKVTEHHTRNKNAKSNANKNNRETSADTSKGSEVQNQKPDYIHVRARRGQATDSHSLAERVRREKISERMKYLQDLIPGCNKVAGKAGMLDEIINYVQSLQRQVEFLSMKLAAVNPRLDFNIDELFAKEVFPSCAQSFPNIGIPSDMSISNNPSYLQFNSAQQLVSCCGGLINSMGISPPNMGLRTNIISTSTVPLPETFLDSSCFAQILPSSNWEGGDFQSLYNVAFDQGRTASFPPQPFTGLVEASNLKMEM

SEQ ID NO: 158 - DNA, 963 bp, Glycine max
  CDS (1)..(963)
atggatcttgccccagaagagcttcaattccttaccatccccgacatcctacgagaatcaatctcaatcccaaagcgttctccgaaaacattttacctcattaccctcagcctcatcttccccctctccttcgcgattctagctcattccctcttcacgcacccccttatttcccagctgcagtcccctttcaacgacccttcccaaacctcccacgagtggaccctccttcttctaatccagttcctctacctcctcttcctcttcgccttctccctcctctccaccgccgccgccgtcttcaccgtcgcctccctctacacctccaaggccgtctccttctcctccaccctctccgccatcccccgcgtcttcaagcgcctcttcctcaccttcctatgggtcaccctcctcatgatcctctacaactccctcatcctcctctccttggtcctcatgatcctcgccatcgacaccgacaactccctcctcctcttcctcgctatcctcatcgtcctcactctctttttagtcgcccacgtctacatcaccgccctctggcacctcgcctccgtcgtctccgtcctcgagcccgtctacggcctcgccgccatgaagaagtcctaccacctcctcaagggcaggctccggttcgccgctgtcctcgtctccgcctatttggtcgcctgcggggttatctccggtgttttcagcgtggttgtggtgcacggtggggaggactatggggttttcaccagaatcgtggtgggagggttccttgtggggcttttggtgattgtgaacttggtggggttgttggtgcagagtgtgttttactatgtttgcaagagttatcatcatcagggtattgataagagcgcgttgcatgatcatcttggtgggtaccttggagaatacgtgcctcttaagagcagcattcagatggagaatttggatgtatga

SEQ ID NO: 159 - protein, 320 aa, Glycine max
MDLAPEELQFLTIPDILRESISIPKRSPKTFYLITLSLIFPLSFAILAHSLFTHPLISQLQSPFNDPSQTSHEWTLLLLIQFLYLLFLFAFSLLSTAAAVFTVASLYTSKAVSFSSTLSAIPRVFKRLFLTFLWVTLLMILYNSLILLSLVLMILAIDTDNSLLLFLAILIVLTLFLVAHVYITALWHLASVVSVLEPVYGLAAMKKSYHLLKGRLRFAAVLVSAYLVACGVISGVFSVVVVHGGEDYGVFTRIVVGGFLVGLLVIVNLVGLLVQSVFYYVCKSYHHQGIDKSALHDHLGGYLGEYVPLKSSIQMENLDV

SEQ ID NO: 160 - DNA, 2145 bp, Glycine max
  CDS (130)..(1827)
aacactagcaaagggaaggaaaagtaccttccccaataacccttctctccgatttggcttctctcatcggagggaaacaatcaataaaagaaaaaaaaaaacccacaaaaagattataacaaaaaaagtatgaaaggaaaagtactaggttccgcagtttctctcatcctagtggtgggtgtggtaattggcgtggttgctgtagttcaaagcccaaagggcgtgaacaacaacaacaatggaggagaattgaaaaccagcaacagggccgtgacagcgttgtgccaaggctcagacgaccagaaactgtgccacgaggttctgtcatcttcgaacagcacagacccaaaggagtacatcgcaaccgtggtgagaacctcgatggacagcgtgatcaaagcgttcaacatgagcgacaggctgacggtggaacacggcaacagcagcgccggaatgaagatggctctggaggattgtaaggacttgttgcagtccgccatccacgacctagaggcctcaggcgtgttggtcaaagagagcagcctacaggacgtgcaccagcgcaccgccgagctcaagaactggttgggagccgttgttgcctaccagcaatcgtgcctggacggcttcgacaccgacggcgagaagaaggtgcaggagcagctgcaatctgggagcttggacaacgttggaaaactcactggcttggcactcgatgtcgtgtcagggatttcacacattctccaatccttggacttgaaccttgctctcaagcccgcctctcgccgccttctggaggtggaccaggaaggctaccccacttgggtctccgctgctgatcgcaagctcttggctcagctcaacgacggtgcagtcttgccccatgctactgtggctaaggatggcagtggtcaatttaccactgttttggacgctattaactcctaccctaagaaacaccaaggcagatacattatctacgttaaggctggtatctacgacgagtacatcaccgttgacaagaagaagcccaatcttttcatctacggtgatggccccacaaataccatcatcactggccgcaagaactttcacgagggtaccaagacaatgagaaccgccaccttctctactgttgccgaggatttcatggcgaagtcaattgcatttgagaacaccgctggtgcagaaggacaccaagcagtggcacttcgcgtgcaaggtgatcgttcagtgttctttgattgtgctatgcgcggttaccaagacacattgtatgcccacgcccatcgtcagttctaccgcaattgcgaaatctctggaacaattgatttcattttcggatactccaccaccttgatccaaaactcgaagatcttggtgaggaagcccatggcaaatcagcagaacatagtggtggcagatggcacagggcagaagaacatgcccacaggaatagtcctccataactgcgagatcatgccggaccctaccctcttggcagaccgcttgagcgtgaagacttacttggccaggccatggaaggcattctcaagggcagtgttcatcgagaatgttatcggggacttgattcagccagatggttatattccatggaacccaattgaaccaaacacacaggattgctacttcgctgagtttggcaacactggaccaggttccgttgctcaagcaagagccaagtttggcaaaggtctcattagcaagcaggaggctgcacaattcactgctgagccttggctccaagctagcacttggttgcctgctgctggcgttcctttcgatgctagcttcaccaaagcttaaggatccgagacaaaccagcatcttgagtgttataatctcttttttagcctacctaaattaataaaactataaacaggaaatcgattacctaatttcaatgcagtcacacatagccactccattgtctgaggagctgatttgtaatcattcaataagcttttcatatttatgatttatgcctttttgtatcaaccacttcatctctgtcttcagtatgcatataacatagactgatgatgggagaagcaatgggaattttgcttttggctatttaatggaaactacttaatttgccaaactaaaaaaaaaaaaaaaaaa

SEQ ID NO: 161 - protein, 565 aa, Glycine max
MKGKVLGSAVSLILVVGVVIGVVAVVQSPKGVNNNNNGGELKTSNRAVTALCQGSDDQKLCHEVLSSSNSTDPKEYIATVVRTSMDSVIKAFNMSDRLTVEHGNSSAGMKMALEDCKDLLQSAIHDLEASGVLVKESSLQDVHQRTAELKNWLGAVVAYQQSCLDGFDTDGEKKVQEQLQSGSLDNVGKLTGLALDVVSGISHILQSLDLNLALKPASRRLLEVDQEGYPTWVSAADRKLLAQLNDGAVLPHATVAKDGSGQFTTVLDAINSYPKKHQGRYIIYVKAGIYDEYITVDKKKPNLFIYGDGPTNTIITGRKNFHEGTKTMRTATFSTVAEDFMAKSIAFENTAGAEGHQAVALRVQGDRSVFFDCAMRGYQDTLYAHAHRQFYRNCEISGTIDFIFGYSTTLIQNSKILVRKPMANQQNIVVADGTGQKNMPTGIVLHNCEIMPDPTLLADRLSVKTYLARPWKAFSRAVFIENVIGDLIQPDGYIPWNPIEPNTQDCYFAEFGNTGPGSVAQARAKFGKGLISKQEAAQFTAEPWLQASTWLPAAGVPFDASFTKA

SEQ ID NO: 162 - DNA, 1428 bp, Glycine max
  CDS (1)..(1428)
atgtctgtggaaaggtcgtttgaggcatgggaagaggtgcagcgtcacgggcaggacctagctgaccgtcttgcccagggttttagcggtttgattcacacgcatatgagccctccgcaattcgcgtggccgaaccctccgacatcgaagctcttcgatctggagttcccttcgcagaactttgggaagagggatttcgctttggcgacccaggagtacgggattaatggcgtgtcagcgatttttgacatcgggaatcggatcggtcaggccggggcggatttcggtgccagcttgaacgggctggttcagcagtttttccggtcgttgccggtgccgatgccattcaagcacgaggagagttcagtgagggtggagggtggggataaggggtggcagagaggaggggttgtggttgctgtgcaggaggatttgggattgcttagtgagaggttgaagaatcgtgggtttgctgagagtgttagtggcagtggtggtggaagcgcggaggaagagggtggtggagggtttaaccttgggtctattggtcttctgggcaggcgacagggaatcataaattttacatcaacttatgatagtagaactcaagaagtggaaggttctttagttgcaaggggagatttgtggagagtagaggcatcacatggtggttctgcgtctagaaatgaaaattcatctcttttcctggttcagcttggacctcttctctttatccgtgattcaactctcctcttgcctgttcatttgtcaaagcagcacttgctgtggtatggctatgatagaaagaatggaatgcattctctttgtccagcagtgtggtcaaaacacagaaggtggctgttaatgtccatgctttgcctgaatcccctagcttgttcatttgtggatcttcaattccctaatgggcaactaacctacgtatctggagagggtctaagtaccagtgctttccttcctgtttatggaggtcttcttcaagctcagggtcaatatcctggggaaatgagattcagcttttcgtgcaagaataagtggggaacaagaatcacaccaatggtacaatggcctgacaaatcattttctttgggtcttgctcaagccttggcctggaagcgatctggtctaatggtgaggccatctgttcaattcagtgtgtgtcctactgttggtggaagcaatccagggttgcgggcagaactcattcattcagttaaagagaaacttaatctaatttgtggatgtgctttcatgacatatccttctgcctttgcttcagtatctattggaagatcaaagtggaatggaaatgtggggaactcgggtctagttctaagagttgatgttcctctctccaccgttgggcgcccttccttctccgttcagataaatagtggcattgagttttga

SEQ ID NO: 163 - protein, 475 aa, Glycine max
MSVERSFEAWEEVQRHGQDLADRLAQGFSGLIHTHMSPPQFAWPNPPTSKLFDLEFPSQNFGKRDFALATQEYGINGVSAIFDIGNRIGQAGADFGASLNGLVQQFFRSLPVPMPFKHEESSVRVEGGDKGWQRGGVVVAVQEDLGLLSERLKNRGFAESVSGSGGGSAEEEGGGGFNLGSIGLLGRRQGIINFTSTYDSRTQEVEGSLVARGDLWRVEASHGGSASRNENSSLFLVQLGPLLFIRDSTLLLPVHLSKQHLLWYGYDRKNGMHSLCPAVWSKHRRWLLMSMLCLNPLACSFVDLQFPNGQLTYVSGEGLSTSAFLPVYGGLLQAQGQYPGEMRFSFSCKNKWGTRITPMVQWPDKSFSLGLAQALAWKRSGLMVRPSVQFSVCPTVGGSNPGLRAELIHSVKEKLNLICGCAFMTYPSAFASVSIGRSKWNGNVGNSGLVLRVDVPLSTVGRPSFSVQINSGIEF

SEQ ID NO: 164 - DNA, 1185 bp, Glycine max
  CDS (1)..(1185)
atgatctcttcgttgagacagcctgttgtagggatcagtggttctgatcttcttttgaggcaaagacatgcaactccaattaaggcaaggtcgtttttaccctctttgtcaagagaaaagggtcaaggatctcttgtttcagttcaaaagccactgcacattggtgcttctcttggtgttggaaattttgtgtcagtgaagagtgatgataaaaggggtgatttggtgaagtgtgaggcctatgaggcagacagatcagaggttgagggtgcaagcacaccgtcagaggctgcaaagaaggtgaaaattgggatatattttgcaacctggtgggctctgaatgtggtgttcaatatttataacaagaaggttctgaatgcctacccttacccttggcttacttcaactctctcacttgcatgtgggtctcttatgatgttgatctcttgggccactgggattgcagaagcccccaagactgatcctgagttttggaagtctttgttccctgttgctgttgcacatacaataggacatgtagcggcaacagttagtatgtcaaaagttgcggtatcgtttacacatattatcaagagtggtgaacctgcttttagtgttctggtttcaagatttcttttgggtgagagcttccctgtgcctgtctatctgtctttaattccaatcattggtggatgtgcacttgctgctgtgactgagctcaatttcaatatgatcggttttatgggagctatgatatcgaatttggcatttgtattccgtaatatcttttccaaaaagggcatgaagggaaagtctgtcagtggaatgaattactatgcttgtttatctattttgtcccttgcaattctcacacccttcgcaattgctgtggaaggaccacagatgtgggctgctggatggcaaacagctatgtctcaaattggaccccaattcatatggtgggtagctgctcaaagtgtattctatcatctatacaatcaagtgtcgtacatgtctctggatcagatctctcccttgacgtttagcattggaaacaccatgaaacgtatatctgtcattgtgtcttccattattatcttccacacaccagttcaacccatcaatgctcttggtgctgccattgctatccttggaaccttcttgtattcacaggcgaaacaatag

SEQ ID NO: 165 - protein, 394 aa, Glycine max
MISSLRQPVVGISGSDLLLRQRHATPIKARSFLPSLSREKGQGSLVSVQKPLHIGASLGVGNFVSVKSDDKRGDLVKCEAYEADRSEVEGASTPSEAAKKVKIGIYFATWWALNVVFNIYNKKVLNAYPYPWLTSTLSLACGSLMMLISWATGIAEAPKTDPEFWKSLFPVAVAHTIGHVAATVSMSKVAVSFTHIIKSGEPAFSVLVSRFLLGESFPVPVYLSLIPIIGGCALAAVTELNFNMIGFMGAMISNLAFVFRNIFSKKGMKGKSVSGMNYYACLSILSLAILTPFAIAVEGPQMWAAGWQTAMSQIGPQFIWWVAAQSVFYHLYNQVSYMSLDQISPLTFSIGNTMKRISVIVSSIIIFHTPVQPINALGAAIAILGTFLYSQAKQ

SEQ ID NO: 166 - DNA, 1176 bp, Glycine max
  CDS (1)..(1176)
atgatctcttcaatgaagtgcacagcctcatctctcacatgttccgctttctcaaacagaaagattcccattgcaaggccacaacttgtcacgttaccaaccattaacaacgttgaacaaaacacgggtctctctcagttgtgttcacagaaaccgctctacctttcatccactgagaacttggcattggtgaagagaaggagggagactgagtgccaggcctatgaagccgataggtcacggcctctggagattaacattgagctgccgggcgaagaggcggcgcagaggttcaagattgggctgtattttgctacatggtgggctttgaatgtggtgttcaacatttacaacaagaaggttttgaatgcttttccttacccatggctcacctccactttgtcccttgctgctggctccctcatgatgttagtctcctgggccaccagggttgctgaggtcccaaaagttaacttggacttctggaaggccttgtttcctgttgcggtggcacacacaattgggcatgttgctgcaactgtgagcatgtccaaggttgctgtttcattcactcacatcatcaagagtggagagccagctttcagtgttcttgtgtcaaggttcttgctcggagaagcattcccaatgccggtatatctgtcactgctgccaattattggtggttgtgcattagctgcagtgactgagctcaatttcaatatgattggctttatgggggctatgatatcaaatttggcattcgtcttccgcaatatattctcaaagaaagggatgaagggaatgtctgttagtggaatgaactactatgcttgtctttccataatgtcactactaattctcacaccttttgccattgctgttgagggccccaaggtttggattgcaggctggcaaacagctgtgtctcagattggtcccaattttgtatggtgggtagctgcccagagtgtcttctaccacttgtacaatcaagtctcatacatgtctcttgatcagatttctcccttaacattcagcattggaaacacaatgaagaggatttcggtcattgtctcttccatccttatctttcacacgcctgttcagcccatcaatgctcttggtgctgccattgcaattcttggcaccttcctctattcacaggctaaacagtaa

SEQ ID NO: 167 - protein, 391 aa, Glycine max
MISSMKCTASSLTCSAFSNRKIPIARPQLVTLPTINNVEQNTGLSQLCSQKPLYLSSTENLALVKRRRETECQAYEADRSRPLEINIELPGEEAAQRFKIGLYFATWWALNVVFNIYNKKVLNAFPYPWLTSTLSLAAGSLMMLVSWATRVAEVPKVNLDFWKALFPVAVAHTIGHVAATVSMSKVAVSFTHIIKSGEPAFSVLVSRFLLGEAFPMPVYLSLLPIIGGCALAAVTELNFNMIGFMGAMISNLAFVFRNIFSKKGMKGMSVSGMNYYACLSIMSLLILTPFAIAVEGPKVWIAGWQTAVSQIGPNFVWWVAAQSVFYHLYNQVSYMSLDQISPLTFSIGNTMKRISVIVSSILIFHTPVQPINALGAAIAILGTFLYSQAKQ

SEQ ID NO: 168 - DNA, 2511 bp, Glycine max
  CDS (1)..(2511)
atgagaacatcacaaattctgttggttttgctttggttcttctgcatttatgccccttcttcgtttggagcaaatgtcacgtatgaccacagagcattggtcattgatggcaagcgccgagtcttggtatctggttctattcattaccctcgtagcactccagagatgtggccagacctcattcagaaatccaaagatggaggacttgatgtgattgagacttatgttttttggaacttacacgaaccagttagaggccagtataactttgaaggtaggggcgatttggtcaaatttgtgaaggtagtagcagcagcaggtctatatgtgcatctccggattggtccatacgcatgtgctgaatggaactacggtggtttccctctttggctacattttattccgggaattcagttccgaactgataacaaaccatttgaggcagaaatgaagcagttcaccgctaagattgtggatttgatgaagcaagagaacctctatgcatcacagggaggacctattattttgtctcagattgaaaatgagtatgggaacattgaagcggattatggtcctgctgctaaatcctacatcaaatgggcagcatcaatggcaacatctcttggtacaggggttccttgggtaatgtgccaacagcaaaatgctcctgatccaattattaacgcgtgcaatggattttactgcgatcaattcaaaccaaactctaacacaaaaccaaaaatatggactgagggttataccggatggtttcttgcatttggtgatgctgtgcctcacagaccagtggaagatcttgcatttgctgtggcacgcttttaccagcgaggtggaacttttcaaaattactatatgtaccatggagggactaattttggccgggcttctgggggaccttttgttgctagtagttatgattatgatgcaccaattgatgagtatggatttattagacagcctaagtggggccaccttaaagacgtgcataaggccataaaactttgtgaagaagcactgatagctactgatccaacaattacatctcttggaccaaatatagaggctgcagtttacaagacaggagttgtatgtgctgccttccttgctaacattgccacatctgatgcaacagtgaccttcaatggaaattcatatcacttgcccgcatggtctgtgagcatcttaccagactgcaagaatgtagtacttaatactgcaaagattacttctgcatctatgatttcaagcttcacaactgaatctttaaaagatgttggttctttggatgattctggctcaagatggagttggattagtgaacctatcggtatttcaaaggctgattcattctcaacatttggattgctggagcaaataaatacaactgctgatagaagtgattacttgtggtactcattaagcattgatcttgatgctggtgctcaaactttccttcatattaaatcccttgggcatgctcttcatgctttcataaatgggaagcttgcagggagtggaaccggcaaccatgagaaagctaatgtcgaagtagacatccccatcacactagtttctgggaagaacacaattgatctcctgagtttaactgtgggacttcagaactatggagctttttttgacacatggggtgcggggatcactggccctgtgatattgaaatgtttgaagaatggcagcaatgttgatctctcctccaagcagtggacatatcaggttggccttaaaaatgaagatttaggtctatctagtggctgttctggacagtggaattcacaatctaccttacctacaaatcaaccgttgacttggtacaagacaaacttcgttgcaccctccggtaacaacccagttgcaattgacttcacggggatgggaaaaggtgaggcttgggtgaatggacagagcattgggcgatactggcctacatatgcctctccaaaaggtggttgtactgattcatgcaattatagaggagcctatgatgcatccaaatgtctcaagaactgtggaaaaccatcacagacattataccatgtacctcgatcatggttacgaccagatagaaacacacttgtattgtttgaggaaagtggaggcaaccctaagcaaatctcttttgccacaaaacaaataggaagcgtgtgttcacatgtatctgaatctcaccctccacctgtagactcgtggaattcaaatacagaatcaggaagaaaagtagttcctgtagtttcactggagtgcccttatcctaatcaggtggtctcatccattaaatttgcaagttttggaacgcctcttgggacttgcgggaacttcaagcatggactctgcagcagcaataaggctctatccattgtgcagaaggcttgcattggatcaagcagttgtagaattgaactatcagttaatacattcggagatccatgtaaaggagtagcaaagagtttagctgttgaagcttcttgtgcatag

SEQ ID NO: 169 - protein, 836 aa, Glycine max
MRTSQILLVLLWFFCIYAPSSFGANVTYDHRALVIDGKRRVLVSGSIHYPRSTPEMWPDLIQKSKDGGLDVIETYVFWNLHEPVRGQYNFEGRGDLVKFVKVVAAAGLYVHLRIGPYACAEWNYGGFPLWLHFIPGIQFRTDNKPFEAEMKQFTAKIVDLMKQENLYASQGGPIILSQIENEYGNIEADYGPAAKSYIKWAASMATSLGTGVPWVMCQQQNAPDPIINACNGFYCDQFKPNSNTKPKIWTEGYTGWFLAFGDAVPHRPVEDLAFAVARFYQRGGTFQNYYMYHGGTNFGRASGGPFVASSYDYDAPIDEYGFIRQPKWGHLKDVHKAIKLCEEALIATDPTITSLGPNIEAAVYKTGVVCAAFLANIATSDATVTFNGNSYHLPAWSVSILPDCKNVVLNTAKITSASMISSFTTESLKDVGSLDDSGSRWSWISEPIGISKADSFSTFGLLEQINTTADRSDYLWYSLSIDLDAGAQTFLHIKSLGHALHAFINGKLAGSGTGNHEKANVEVDIPITLVSGKNTIDLLSLTVGLQNYGAFFDTWGAGITGPVILKCLKNGSNVDLSSKQWTYQVGLKNEDLGLSSGCSGQWNSQSTLPTNQPLTWYKTNFVAPSGNNPVAIDFTGMGKGEAWVNGQSIGRYWPTYASPKGGCTDSCNYRGAYDASKCLKNCGKPSQTLYHVPRSWLRPDRNTLVLFEESGGNPKQISFATKQIGSVCSHVSESHPPPVDSWNSNTESGRKVVPVVSLECPYPNQVVSSIKFASFGTPLGTCGNFKHGLCSSNKALSIVQKACIGSSSCRIELSVNTFGDPCKGVAKSLAVEASCA

SEQ ID NO: 170 - DNA, 2328 bp, Arabidopsis thaliana
atggacgttctcgccttatcctcttccgcttccgccgccgcaccctccgcttctctcgccggaaaattcctgtcgtttccttctagggttagagtgagaagaaaccgagagaatttgttagctaaacagaagaagtttttagtttctgcttcgaaaagagaagagcctaagctcaacgaatgggatcaaatggagctcaactttggccgtttactcggcgaagacccgaaattgactttggctaagatagtagctagaaaagtggatccagaagcttcttttattgacattgagaaatctttctacaagaacaaaggtaaaattcctgaagttgaagagattccattggattggtcaaaggataacaagaagaaatctactagttcactggatggattgaaattggtaaagcctgttctgaaagatggagtcaagttcgaaaggccagtgatgaagaagccaagccctgttttgaagaagccattggtggaggctgttgctgctccaaaggtgcagagattgcctaatgttatattgagaaagccgagttcgttttatactagtaatggtgatgatgaggagtctaagttgcggttgaaaccgaatctgacattgaaaatgagaaatgagagggaaaatgagaggtttagtgatatgacattgttgagaaaaccggaaccagtgagcgtagttgcagaagaggaagacaagcctctttctgatgatttaactatggaggaaggagaacaggaaggtggaacatattcacagtatactcttttggagaagccagaagcgaggctccagcctgtcaatgtagaagaggaagttggagatagcggaggagtggaatcatctgagatagtaaacaactcaattcagaagccagaagcaaggccagagcttgagaacatagaaaaggaagttgcagatagcggagttttggaatcatcggagatagaaaataattcaattccaactgaaatgcagctcaatagcgagatgtcctctgaggagaaaactattaacagtgatccactcgagagaattccttcgaaaccaatttctcaaaccatcgtcgaagcttctttacaagggaaaccacaaagattagacccgtcttccgctgagccatcagttccgaacataggaaaaccgtcagtcgtgaaccatgaaggccgtcaggtctctgttgagctcaagggccctcctaccagatcgtccttggaggaaaatgattggaataaggcagagtctctagttaaaacagaattacgagcagatgttgagctaataagttcaagcactagaggatttgctgtttcctatggatctttgattggatttttaccctaccggaaccttgcagcaaaatggaagtttctcgcatttgaatcatggttaagaagaaaaggtgtagatccatcaccgtatcgacaaaaccttggggtaattggaggtcaagatgtcacgagtaaatctccatctccagattcaagcttagattctgaagtcgctacaacgatcaacggagaagtttcttctgatatgaagctggaagatcttcttatggtatatgacagagagaagcagaagttcctgtcatcttttgttggtcagaaaatcaaagtgaatgttgttatggcaaatcgaaattcaaggaagcttatattttcaatgaggccgagagaaaatgaagaggaagttgagaaaaaacgaactcttatggctaagcttcgtgttggggatgttgtgaaatgctgcatcaagaaaattacctattttggtattttctgtgagctagaaggtgtccctgcattggttcaccagtcagaagtttcatgggatgcaactttagaccctgcttcatatttcaagattggtcagattgtggaagcgaaagtgcaccagctagattttgctcttgaacgtatcttcttgtcattaaaagaaattacgcctgatcctcttactgaagctttagaatctgtagttggtggtgataatgatcagttggggggacgattacaagcagcagagctcgacgctgaggtttctgaaacctttcttctgcagtggcctgacgtggaatctctgatcaaagagctggaaatggttgaaggaatccaatcagtctcaaaaagtcgtttcttcttgagtccgggtcttgctccaacgtttcaggtttacatggctccaatgtttgagaaccaatacaaactgcttgctcgagctggaaacagagtacaagagcttattgttgaagcatccttgagcaaagaagagatgaaatctacaatcatgtcttgcaccaacagagtagaatga

SEQ ID NO: 171 - DNA, 2520 bp, Arabidopsis thaliana; identical to SEQ ID NO: 101

SEQ ID NO: 172 - DNA, 1239 bp, Arabidopsis thaliana; identical to SEQ ID NO: 107

SEQ ID NO: 173 - DNA, 963 bp, Arabidopsis thaliana; identical to SEQ ID NO: 85
  CDS (1)..(963)

SEQ ID NO: 174 - protein, 320 aa, Arabidopsis thaliana; identical to SEQ ID NO: 86

SEQ ID NO: 175 - DNA, 1716 bp, Arabidopsis thaliana; identical to SEQ ID NO: 87
  CDS (1)..(1716)

SEQ ID NO: 176 - protein, 571 aa, Arabidopsis thaliana; identical to SEQ ID NO: 88

SEQ ID NO: 177 - DNA, 513 bp, Arabidopsis thaliana
  CDS (1)..(513)
atggttcttgccaggctgatcttccaagcaacgatctatcccatttggctagacaaaacggaggcgtccgacatcagcaagctagccacccagtttggtacattgagactcatcgatgaagctattagtgggaaacttgcctcatacacatcgtacgaacatctccaactagaagctttaattgcttggttccaccatcttcaacctaaatttgaaaacaacctaaacgagaatacctcaaagtctgcgttatcttctgaattctgtaaggttggtgcttgcttgcttcttacgcttcccgaagatgtgttttctgttatctctcactttctttctccaagcgacatttgcgatataatcttttgctgcaaaagtctttgtgcccttgtcgattccgagaagacatggcttgttcaatatgaagtcgttaaggtggtgaagcctcttgttgggatttgggttcaaaagaaccctgtaattgggatttcttatccgttgttggatgccggataa

SEQ ID NO: 178 - protein, 170 aa, Arabidopsis thaliana
MVLARLIFQATIYPIWLDKTEASDISKLATQFGTLRLIDEAISGKLASYTSYEHLQLEALIAWFHHLQPKFENNLNENTSKSALSSEFCKVGACLLLTLPEDVFSVISHFLSPSDICDIIFCCKSLCALVDSEKTWLVQYEVVKVVKPLVGIWVQKNPVIGISYPLLDAG

SEQ ID NO: 179 - protein, 775 aa, Arabidopsis thaliana
MDVLALSSSASAAAPSASLAGKFLSFPSRVRVRRNRENLLAKQKKFLVSASKREEPKLNEWDQMELNFGRLLGEDPKLTLAKIVARKVDPEASFIDIEKSFYKNKGKIPEVEEIPLDWSKDNKKKSTSSLDGLKLVKPVLKDGVKFERPVMKKPSPVLKKPLVEAVAAPKVQRLPNVILRKPSSFYTSNGDDEESKLRLKPNLTLKMRNERENERFSDMTLLRKPEPVSVVAEEEDKPLSDDLTMEEGEQEGGTYSQYTLLEKPEARLQPVNVEEEVGDSGGVESSEIVNNSIQKPEARPELENIEKEVADSGVLESSEIENNSIPTEMQLNSEMSSEEKTINSDPLERIPSKPISQTIVEASLQGKPQRLDPSSAEPSVPNIGKPSVVNHEGRQVSVELKGPPTRSSLEENDWNKAESLVKTELRADVELISSSTRGFAVSYGSLIGFLPYRNLAAKWKFLAFESWLRRKGVDPSPYRQNLGVIGGQDVTSKSPSPDSSLDSEVATTINGEVSSDMKLEDLLMVYDREKQKFLSSFVGQKIKVNVVMANRNSRKLIFSMRPRENEEEVEKKRTLMAKLRVGDVVKCCIKKITYFGIFCELEGVPALVHQSEVSWDATLDPASYFKIGQIVEAKVHQLDFALERIFLSLKEITPDPLTEALESVVGGDNDQLGGRLQAAELDAEVSETFLLQWPDVESLIKELEMVEGIQSVSKSRFFLSPGLAPTFQVYMAPMFENQYKLLARAGNRVQELIVEASLSKEEMKSTIMSCTNRVE

SEQ ID NO: 180 - DNA, 4146 bp, Arabidopsis thaliana
  CDS (1)..(4146)
atgagaaattgtcttccaatggaattgaatctgcgcaagggcgacaaggtttgggtcgaagataaggatttggcttggattgctgctgatgtcctcgattcttttgataacaaactccatgttgaaacttctactgggaagaaggtttttgtttccccggaaaagctatttcggagggatcctgacgatgaagagcataatggagtggatgatatgaccaaactgacatacttgcacgaagctggtgttctttataatctacagaggagatatgctctgaatgatatctatacatacactggaagcattctgatcgctgttaatccattcaaaaagcttccacatctctacaatgggcacatgatggaacagtacatgggagcaccattcggtgagctcagtcctcatgtttttgcagtttctgatgttgcatacagagcaatgattgacgacagtcgaagtcagtcaatacttgttagcggtgaaagtggagctggaaaaactgagacaaccaaactaatcatgcagtatcttacatttgttgggggacgtgctactgacgatgatagaagtgttgagcagcaagtccttgaatcaaatcctctcttggaagcatttggcaatgcaaaaacagttagaaatgataattccagccgttttggaaagtttgtcgaaatccagtttgacacaaatggtagaatatctggtgccgcaatcagaacctatcttctggagagatcacgtgttgtccggataacagaccccgagaggaattatcattgtttttatcaattgtgcgcttcggggaatgacgctgagaaatataaactaagcaaccctcgtcaatttcattatctaaatcaaagcaagacctatgaattagaaggagtcagcagcgcagaagagtataagaatacaaggagggcaatggatattgtgggcataagtcaggatgagcaggaagggatatttcgcacacttgctgcgattctacatcttggaaatgttgagttttcctcagggagagagcacgactcttcagtggtaaaggatccggaatctagacatcatctgcagatggctgctgatcttttcaagtgtgatgcaaatcttttgctggcttcgctctgcacacgttcaattctgacccgtgaaggtatcattatcaaagcacttgaccctaatgctgctgttactagccgggataccctcgcgaagactgtttacgcccatctatttgactggctggttgataagatcaataagtctgttgggcaagatccagaatctcgttttcaaataggagtcctggacatttatggctttgaatgttttaagaataacagttttgaacaattttgcatcaactttgcaaatgaaaagctgcagcaacatttcaacgagcatgtattcaagatggagcaggatgagtacagaaaagaagaaattaattggagttatatcgagtttattgacaaccaagatgtcttggaccttattgagaagaagcctattggggtgattgcactcttagatgaagcttgcatgtttcctagatcaactcatgagtcattttcaatgaagctgtttcagaactttagatttcatccgagattggagaagccaaaattttcagagacggattttactctctctcattatgctggcaaggcaacctttttggataaaaaccgtgattatactatagtggagcattgcaatctgctgtcttcctccaaatgcccttttgttgctggaattttcccctcagccccggaggagtctaccagatcttcttacaaattttcttctgtatcttccagatttaagcaacaacttcaagccctcatggaaactctcagcaaaacagagcctcactatgttcggtgtgtgaagccaaactcactcaacagacctcaaaagtttgagagtcttagtgttttacatcaacttcgttgtgggggtgtactggaagctgttcggattagtctagcagggtatcccactcgaaggaattattcagacttcgtggatcgttttggtctgctagctccagaattcatggatgagagcaatgatgagcaggcactgactgagaaaatcttgagtaaattaggtcttgggaattatcagctaggaaggacaaaagtgttcctaagagctggtcaaattggcattttggactctaggcgggctgaagtccttgatgcttctgcaagacttattcagcgaagactgagaacatttgtaacgcatcagaacttcatctctgcacgggcttctgcaatttcaattcaggcatactgtagaggatgcctgtctcgaaatgcttatgccaccagaaggaatgcggcggcagctgtcttggtccaaaagcatgtgcgcaggtggctgtcaagatgtgcatttgtaaaacttgtatcagctgccattgtattacagtcttgcatccgtgctgactcaactcgcttaaagttttcacatcagaaagagcatcgagctgcttctctaattcaggctcattggagaatccataagtttcgctcagcattcaggcaccgtcagtcatctattattgctattcagtgtcgttggcgacagaagcttgcgaagagagagtttagaaaacttaaacaggttgctaatgaagcaggtgctttgcgattagctaaaacgaaacttgaaaaacggttagaagatcttgaatggcggttgcagcttgagaaacgattgagaacaagtggtgaagaggccaagtcaagtgaaatatccaagcttcagaaaacattggaatccttcagcctcaaactagacgcagctaggctggctaccattaatgagtgcaataaaaatgcggtacttgaaaagcaactagacatatccatgaaggagaagtctgctgttgaaagagagcttaatggaatggttgaactaaaaaaagataacgccttgctgaagaattcgatgaactccttggaaaagaagaatcgggttcttgagaaggagcttctcaatgctaaaaccaattgcaataatacactacagaagttgaaggaagctgaaaaaaggtgttctgaactccagacgagtgttcaaagtcttgaggagaaactctctcatctggaaaacgagaaccaggtcttgatgcaaaagacgctaattacatccccagagagaataggacagatacttggtgaaaaacactctagtgctgttgtaccagcccaaaatgacaggagatctgtatttgagaactacgaattgctctccaggtgtataaaggaaaatttgggattcaatgatgataagccactggctgcctgtgtaatatacaaatgtcttctgcactggcgtgcctttgaatctgagagcacagccatatttaacatcattattgagggaatcaatgaagccctgaagagaaatctgcggtcaaatagttttctaaatgcaagtgctcagcgttctgggagggctgcatatggagtaaagtctccttttaaacttcatggacctgatgatggtgcttcgcatatagaagcaagatatccagcattattatttaaacagcagctgacagcatgtgtggagaagatttatggtttaattcgtgataatttgaaaaaagaattatcaccgcttctgggatcatgcattcaggtaccctcgttcttcattcgcaaacttgtgactcaggttttctcattcatcaacctatcacttttcaacagtcttcttcttcgtcgtgaatgttgcacattttcaaatggggaatatgtgaaatctgggatttcagaattggagaagtggatagctaatgcgaaggaggaggtattgactataaggcaaatatatcgaataagtacgatgtactgggatgataaatatggaactcaaagtgtctcaagtgaggtggtttctcaaatgagggtacttgtggacaaggataaccaaaaacaaacatcaaattcgttcttgctggacgatgatatgagcattcctttctctgcagaagatatagacaaggctattccagtattagacccatcagaaatagaacctccaaaattcgtatcagaatatacttgtgcacagtcccttgtgaagaaaccctccatagcttcaacctcaaagcagatcatttga

SEQ ID NO: 181 - protein, 1381 aa, Arabidopsis thaliana
MRNCLPMELNLRKGDKVWVEDKDLAWIAADVLDSFDNKLHVETSTGKKVFVSPEKLFRRDPDDEEHNGVDDMTKLTYLHEAGVLYNLQRRYALNDIYTYTGSILIAVNPFKKLPHLYNGHMMEQYMGAPFGELSPHVFAVSDVAYRAMIDDSRSQSILVSGESGAGKTETTKLIMQYLTFVGGRATDDDRSVEQQVLESNPLLEAFGNAKTVRNDNSSRFGKFVEIQFDTNGRISGAAIRTYLLERSRVVRITDPERNYHCFYQLCASGNDAEKYKLSNPRQFHYLNQSKTYELEGVSSAEEYKNTRRAMDIVGISQDEQEGIFRTLAAILHLGNVEFSSGREHDSSVVKDPESRHHLQMAADLFKCDANLLLASLCTRSILTREGIIIKALDPNAAVTSRDTLAKTVYAHLFDWLVDKINKSVGQDPESRFQIGVLDIYGFECFKNNSFEQFCINFANEKLQQHFNEHVFKMEQDEYRKEEINWSYIEFIDNQDVLDLIEKKPIGVIALLDEACMFPRSTHESFSMKLFQNFRFHPRLEKPKFSETDFTLSHYAGKATFLDKNRDYTIVEHCNLLSSSKCPFVAGIFPSAPEESTRSSYKFSSVSSRFKQQLQALMETLSKTEPHYVRCVKPNSLNRPQKFESLSVLHQLRCGGVLEAVRISLAGYPTRRNYSDFVDRFGLLAPEFMDESNDEQALTEKILSKLGLGNYQLGRTKVFLRAGQIGILDSRRAEVLDASARLIQRRLRTFVTHQNFISARASAISIQAYCRGCLSRNAYATRRNAAAAVLVQKHVRRWLSRCAFVKLVSAAIVLQSCIRADSTRLKFSHQKEHRAASLIQAHWRIHKFRSAFRHRQSSIIAIQCRWRQKLAKREFRKLKQVANEAGALRLAKTKLEKRLEDLEWRLQLEKRLRTSGEEAKSSEISKLQKTLESFSLKLDAARLATINECNKNAVLEKQLDISMKEKSAVERELNGMVELKKDNALLKNSMNSLEKKNRVLEKELLNAKTNCNNTLQKLKEAEKRCSELQTSVQSLEEKLSHLENENQVLMQKTLITSPERIGQILGEKHSSAVVPAQNDRRSVFENYELLSRCIKENLGFNDDKPLAACVIYKCLLHWRAFESESTAIFNIIIEGINEALKRNLRSNSFLNASAQRSGRAAYGVKSPFKLHGPDDGASHIEARYPALLFKQQLTACVEKIYGLIRDNLKKELSPLLGSCIQVPSFFIRKLVTQVFSFINLSLFNSLLLRRECCTFSNGEYVKSGISELEKWIANAKEEVLTIRQIYRISTMYWDDKYGTQSVSSEVVSQMRVLVDKDNQKQTSNSFLLDDDMSIPFSAEDIDKAIPVLDPSEIEPPKFVSEYTCAQSLVKKPSIASTSKQII

SEQ ID NO: 182 - DNA, 1341 bp, Arabidopsis thaliana
  CDS (1)..(1341)
atggatttctccggtttgtttctcactctctccgcggcggctctgtttctctgtttactccgatttatcgccggagtccgccgtagctcctccacgaaactccctcttcctccgggaacaatgggttatccttacgtcggcgaaacattccaactttactcacaagaccctaatgtgttctttgcagcaaaacagagaagatacggatcggtgttcaagactcatgtattgggatgtccatgtgtgatgatctcgagccctgaagcagcgaaattcgtattggttacaaagtctcatttgtttaaaccgacttttccggccagtaaagagaggatgcttggaaaacaagccatcttcttccatcaaggagattatcattccaaacttagaaagcttgttttaagagctttcatgcctgatgcaatcagaaacatggtccctcacattgaatcaattgctcaagaatcactcaattcttgggatggaactcaactcaacacttaccaggaaatgaaaacatacactttcaatgttgcgttaatctcaatactcggcaaagacgaagtttattaccgagaagatctaaaacgatgctactacattctagagaaaggttacaattcgatgccgattaatcttccaggaacattattccacaaagccatgaaagctcgcaaggagctagctcaaatcctcgctaacatcttatccaaaagaagacaaaacccatcatcacacacagatctcctcggatcattcatggaagacaaagcaggattaaccgacgaacaaatcgccgataacatcatcggagtaatcttcgccgcaagagacacgacggcgagtgttctgacgtggatcctcaagtacttagctgataatccaactgttctagaagctgtcactgaagagcaaatggcaataaggaaagataaaaaagaaggagagagtctcacttgggaagatacaaagaagatgccattaacttatagagtaatccaagagacattaagagctgctacaatcttatctttcacatttagagaagctgtcgaagatgtcgaatacgaaggatatttgataccaaagggatggaaagtactgccactattcagaaatattcatcacaatgctgatatattttcggatccggggaaattcgatccgtcgagattcgaagttgcgccgaaaccgaatacattcatgccttttggtagtgggattcattcttgtccaggcaatgagttagctaaacttgaaatctctgttctaatccatcatctcaccactaagtacaggttggtacaccttcaaaatgataatagtccttttgggaattga

SEQ ID NO: 183 - protein, 446 aa, Arabidopsis thaliana
MDFSGLFLTLSAAALFLCLLRFIAGVRRSSSTKLPLPPGTMGYPYVGETFQLYSQDPNVFFAAKQRRYGSVFKTHVLGCPCVMISSPEAAKFVLVTKSHLFKPTFPASKERMLGKQAIFFHQGDYHSKLRKLVLRAFMPDAIRNMVPHIESIAQESLNSWDGTQLNTYQEMKTYTFNVALISILGKDEVYYREDLKRCYYILEKGYNSMPINLPGTLFHKAMKARKELAQILANILSKRRQNPSSHTDLLGSFMEDKAGLTDEQIADNIIGVIFAARDTTASVLTWILKYLADNPTVLEAVTEEQMAIRKDKKEGESLTWEDTKKMPLTYRVIQETLRAATILSFTFREAVEDVEYEGYLIPKGWKVLPLFRNIHHNADIFSDPGKFDPSRFEVAPKPNTFMPFGSGIHSCPGNELAKLEISVLIHHLTTKYRLVHLQNDNSPFGN

SEQ ID NO: 184 - DNA, 1452 bp, Arabidopsis thaliana; identical to SEQ ID NO: 81
  CDS (1)..(1452)

SEQ ID NO: 185 - protein, 483 aa, Arabidopsis thaliana; identical to SEQ ID NO: 82

SEQ ID NO: 186 - DNA, 1320 bp, Arabidopsis thaliana; identical to SEQ ID NO: 83
  CDS (1)..(1320)

SEQ ID NO: 187 - protein, 439 aa, Arabidopsis thaliana; identical to SEQ ID NO: 84

SEQ ID NO: 188 - DNA, 753 bp, Arabidopsis thaliana; identical to SEQ ID NO: 5
  CDS (1)..(753)

SEQ ID NO: 189 - protein, 250 aa, Arabidopsis thaliana; identical to SEQ ID NO: 6

SEQ ID NO: 190 - DNA, 2028 bp, Arabidopsis thaliana; identical to SEQ ID NO: 7
  CDS (1)..(2028)

SEQ ID NO: 191 - protein, 675 aa, Arabidopsis thaliana; identical to SEQ ID NO: 8

SEQ ID NO: 192 - DNA, 1233 bp, Arabidopsis thaliana
  CDS (1)..(1233)
atgctttcttcaatcaaaccatcttcgtcttccttctccaccgctatctccggcagcgtaaggcggtcaattcctacaaagctcaagttttctcctttactcatcatcaaaaactgccataaccaaagctttaacgctaatgttgtctcccatcaaaagcctctacacatttcatctgcttcgaatttcaagcgtgaggtcaaagtcgaagcttacgaggccgatcgttcccgtccactggacatcaacatcgagcttcccgatgaacaatccgcgcagaaactgaaaatcggaatctacttcgcaacttggtgggcacttaacgttgtcttcaacatctacaacaagaaagtcctcaatgcttttccttacccgtggcttacttcgacgttgtctctcgcttgtggttctttgatgatgcttgtctcttgggctactagaatcgcagatgctcctaaaactgatctcgagttctggaaaactctgttcccggtcgctgtagcacacacgataggacacgttgcagcaacagtgagtatgtcaaaagtagcagtttccttcacacacatcattaaaagtggtgaaccagctttcagtgtcttagtctcaagattcttcatgggagagactttccctcttcctgtctatctctctctcttaccaatcatcggaggctgcgctctcgcggccatcaccgagcttaacttcaacatcactgggtttatgggggcaatgatatcgaatttggcatttgtgttccggaatatcttttcgaagaaagggatgaaagggaagtcagtgagcggaatgaactactacgcttgcttatcgatgatgtctcttgtgatcctcactccattttctattgccgtggaaggtcctcaaatgtgggctgctggttggcaaaatgcggtttctcaagtcggaccaaactttgtctggtgggtagtggcacaaagtgtgttttaccatttgtacaatcaggtctcatacatgtcattagaccagatttcgccgttaactttcagtatcggtaatacgatgaagcggatttccgttattgttgcatcgatcatcattttccataccccgattcaaccggttaatgccctcggtgctgccattgcgatttttggaactttcctctactcacaggtaaacaaacaaacttattcttgtttacctacctctagtacttggttctttagtgaacaatttctagttctaatataa

SEQ ID NO: 193 - protein, 410 aa, Arabidopsis thaliana
MLSSIKPSSSSFSTAISGSVRRSIPTKLKFSPLLIIKNCHNQSFNANVVSHQKPLHISSASNFKREVKVEAYEADRSRPLDINIELPDEQSAQKLKIGIYFATWWALNVVFNIYNKKVLNAFPYPWLTSTLSLACGSLMMLVSWATRIADAPKTDLEFWKTLFPVAVAHTIGHVAATVSMSKVAVSFTHIIKSGEPAFSVLVSRFFMGETFPLPVYLSLLPIIGGCALAAITELNFNITGFMGAMISNLAFVFRNIFSKKGMKGKSVSGMNYYACLSMMSLVILTPFSIAVEGPQMWAAGWQNAVSQVGPNFVWWVVAQSVFYHLYNQVSYMSLDQISPLTFSIGNTMKRISVIVASIIIFHTPIQPVNALGAAIAIFGTFLYSQVNKQTYSCLPTSSTWFFSEQFLVLI

SEQ ID NO: 194 - DNA, 1563 bp, Arabidopsis thaliana; identical to SEQ ID NO: 3
  CDS (1)..(1563)

SEQ ID NO: 195 - protein, 520 aa, Arabidopsis thaliana; identical to SEQ ID NO: 4

SEQ ID NO: 196 - DNA, 1341 bp, Arabidopsis thaliana
  CDS (1)..(1341)
atggcgaacttggtcttatcagaatgtggtatacgacctctccccagaatctacacaacacccagatccaatttcctctccaacaacaacaaattcagaccatcactttcttcttcttcttacaaaacatcatcatctcctctgtcttttggtctgaattcacgagatgggttcacgaggaattgggcgttgaatgtgagcacaccattaacgacaccaatatttgaggagtctccattggaggaagataataaacagagattcgatccaggtgcgcctcctccgttcaatttagctgatattagagcagctatacctaagcattgttgggttaagaatccatggaagtctttgagttatgtcgtcagagacgtcgctatcgtctttgcattggctgctggagctgcttacctcaacaattggattgtttggcctctctattggctcgctcaaggaaccatgttttgggctctctttgttcttggtcatgactgtggacatggtagtttctcaaatgatccgaagttgaacagtgtggtcggtcatcttcttcattcctcaattctggtcccataccatggctggagaattagtcacagaactcaccaccagaaccatggacatgttgagaatgacgaatcttggcatcctatgtctgagaaaatctacaatactttggacaagccgactagattctttagatttacactgcctctcgtgatgcttgcataccctttctacttgtgggctcgaagtccggggaaaaagggttctcattaccatccagacagtgacttgttcctccctaaagagagaaaggatgtcctcacttctactgcttgttggactgcaatggctgctctgcttgtttgtctcaacttcacaatcggtccaattcaaatgctcaaactttatggaattccttactggataaatgtaatgtggttggactttgtgacttacctgcatcaccatggtcatgaagataagcttccttggtaccgtggcaaggagtggagttacctgagaggaggacttacaacattggatcgtgactacggattgatcaataacatccatcatgatattggaactcatgtgatacatcatcttttcccgcagatcccacattatcatctagtagaagcaacagaagcagctaaaccagtattagggaagtattacagggagcctgataagtctggaccgttgccattacatttactggaaattctagcgaaaagtataaaagaagatcattacgtgagcgacgaaggagaagttgtatactataaagcagatccaaatctctatggagaggtcaaagtaagagcagattga

SEQ ID NO: 197 - protein, 446 aa, Arabidopsis thaliana
MANLVLSECGIRPLPRIYTTPRSNFLSNNNKFRPSLSSSSYKTSSSPLSFGLNSRDGFTRNWALNVSTPLTTPIFEESPLEEDNKQRFDPGAPPPFNLADIRAAIPKHCWVKNPWKSLSYVVRDVAIVFALAAGAAYLNNWIVWPLYWLAQGTMFWALFVLGHDCGHGSFSNDPKLNSVVGHLLHSSILVPYHGWRISHRTHHQNHGHVENDESWHPMSEKIYNTLDKPTRFFRFTLPLVMLAYPFYLWARSPGKKGSHYHPDSDLFLPKERKDVLTSTACWTAMAALLVCLNFTIGPIQMLKLYGIPYWINVMWLDFVTYLHHHGHEDKLPWYRGKEWSYLRGGLTTLDRDYGLINNIHHDIGTHVIHHLFPQIPHYHLVEATEAAKPVLGKYYREPDKSGPLPLHLLEILAKSIKEDHYVSDEGEVVYYKADPNLYGEVKVRAD

SEQ ID NO: 198 - DNA, 2100 bp, Arabidopsis thaliana
  CDS (1)..(2100)
atggaggacgaaccaaagctcccaaccgatgacggtccaactttcaacgaatcgtgtaaaatctcgtctgagatattgaccgccggtgatcggaaattacttaaagttgaactcctcaaagaggagaccacgctcgtatcgtggaagaagcttatggatgaggctagcaaagaaaacggcggcttgttcgtttcggctcccgaacggcttcttaatgccaaccctaacctcgagtttcgccttgcaccgggggcacaaacagagaatgaaatggtgaatcaacctcatcctaatcgtcttaactctgttatagccaagattgagagactttatatgggtaaagacggtagtgatggggaagagttagacggtgctcctgacgatgatgactatgacactgaagattcatttatcgatgatgctgaattggatgagtattttgaagttgataattcgccaattaaacatgatggattttttgtcaatagaggaaagttagaacgaattgaaccttcagctacatcgaaccagcagcaaccaaagaaaaggcgaaggaaggagtcagcaaaaccttgtggcgatgttgttgatgtatccagaaaacgagccaagatggctaagacggctgggggaaaggatcaatctgcttctcctgggccctcttcgaagaaaatttccaatgattcaaagacggtgcaagattcgttttcccctttgaaagcgcaaaatggcaatgattccttagttttggaaaatgtgaagcatactgataaagcgaatcaccagccaatgaatgccacgagtccgaagtcaaaggcagctggatcttctggcccccttcatccgaagtgcagcagcaaaagtgttcatgaacaatctaattcccctccaggaaaatctcggccaaatgtttcggcaaaatcagcagtagttcgtcagcaagttaacaatggcatgcctgacctggacattgcaacggaaagcaaaacatctattcaaatatctaaaaaaagcggttcaaatggccggcctaaatactcgacacttgagaaagccatcaggaatttggagaagttggtcgctgaatcaaggcctcctgctgccactgagaatcaagatgccgatatctcttcccaagcagtgaagaggggattgccaggagatgtaaaattgcatcttgctaaagttgctagaatcgcgtatgcgagccaaggtgaaatatcaggagagttaatcaatcgtctcatgggcattgtcggtcatctaatacagattagatcacttaaggtgaaagctcttccattccagaaagagctaacaagatctgtatttgttagtgaaggagttcaagctcttacggaaacaaatcaagaagctggaacatcagacgattttcaggatgttggatctcttggaaagtcacctgtgaagaagtttgtcatggatgtggcgctggaggaaaaattgtgtgatctatatgacgtgtttgttgagggaatggatgaacattcaggttcacaaatcagaaagctttattcagatctagctcaactgtggcccaatagtttagttgacaatcatgagatcaggcgtgccatttgccgggaaaaggaaaggcggagagcattggaaggaaacattgggaaggagatggatcaaacgaagataacaaagaagaaacagacacaattggtccctaaatctgagggtattacttatcccgacaagacttcaggtgttgaagttaaagcaagtgttgtcctaactgcaaccaccacgtccttagtggactgtcaacctgcagcagactcgtcctttgaaaggtcaaagcagcaacatgagaaattaaagcgaacttcgagcttaagcaatcctgcagcagaaggaaagaaagtcagaagaaagacagaaccagctctagaagaaactcacctgcccgcagagaaacccctcgttctggccctgaagcggcagacacatctaaaatccaagacacataaacaggtacaggtacatccacagtccaaggcacataaacaggcacaggtacatccaaaggccaagacacagactcctccagacctgaacctgccaagttag

SEQ ID NO: 199 - protein, 699 aa, Arabidopsis thaliana
MEDEPKLPTDDGPTFNESCKISSEILTAGDRKLLKVELLKEETTLVSWKKLMDEASKENGGLFVSAPERLLNANPNLEFRLAPGAQTENEMVNQPHPNRLNSVIAKIERLYMGKDGSDGEELDGAPDDDDYDTEDSFIDDAELDEYFEVDNSPIKHDGFFVNRGKLERIEPSATSNQQQPKKRRRKESAKPCGDVVDVSRKRAKMAKTAGGKDQSASPGPSSKKISNDSKTVQDSFSPLKAQNGNDSLVLENVKHTDKANHQPMNATSPKSKAAGSSGPLHPKCSSKSVHEQSNSPPGKSRPNVSAKSAVVRQQVNNGMPDLDIATESKTSIQISKKSGSNGRPKYSTLEKAIRNLEKLVAESRPPAATENQDADISSQAVKRGLPGDVKLHLAKVARIAYASQGEISGELINRLMGIVGHLIQIRSLKVKALPFQKELTRSVFVSEGVQALTETNQEAGTSDDFQDVGSLGKSPVKKFVMDVALEEKLCDLYDVFVEGMDEHSGSQIRKLYSDLAQLWPNSLVDNHEIRRAICREKERRRALEGNIGKEMDQTKITKKKQTQLVPKSEGITYPDKTSGVEVKASVVLTATTTSLVDCQPAADSSFERSKQQHEKLKRTSSLSNPAAEGKKVRRKTEPALEETHLPAEKPLVLALKRQTHLKSKTHKQVQVHPQSKAHKQAQVHPKAKTQTPPDLNLPS

SEQ ID NO: 200 - DNA, 2352 bp, Arabidopsis thaliana; identical to SEQ ID NO: 69
  CDS (1)..(2352)

SEQ ID NO: 201 - protein, 783 aa, Arabidopsis thaliana; identical to SEQ ID NO: 70

SEQ ID NO: 202 - DNA, 2694 bp, Arabidopsis thaliana; identical to SEQ ID NO: 9
  CDS (1)..(2694)

SEQ ID NO: 203 - protein, 897 aa, Arabidopsis thaliana; identical to SEQ ID NO: 10

SEQ ID NO: 204 - DNA, 633 bp, Arabidopsis thaliana; identical to SEQ ID NO: 11
  CDS (1)..(633)

SEQ ID NO: 205 - protein, 210 aa, Arabidopsis thaliana; identical to SEQ ID NO: 12

SEQ ID NO: 206 - DNA, 879 bp, Arabidopsis thaliana; identical to SEQ ID NO: 51
  CDS (1)..(879)

SEQ ID NO: 207 - protein, 292 aa, Arabidopsis thaliana; identical to SEQ ID NO: 52

SEQ ID NO: 208 - DNA, 1527 bp, Arabidopsis thaliana; identical to SEQ ID NO: 53
  CDS (1)..(1527)

SEQ ID NO: 209 - protein, 508 aa, Arabidopsis thaliana; identical to SEQ ID NO: 54

SEQ ID NO: 210 - DNA, 1065 bp, Arabidopsis thaliana; identical to SEQ ID NO: 57
  CDS (1)..(1065)

SEQ ID NO: 211 - protein, 354 aa, Arabidopsis thaliana; identical to SEQ ID NO: 58

SEQ ID NO: 212 - DNA, 1062 bp, Arabidopsis thaliana
  CDS (1)..(1062)
atgcatttctcttcgtcttcaacatcgtccacttggacaatcttaatcacattgggatgtcttatgcttcatgcatctttgtccgctgctcaactcacccctaccttctacgataggtcatgtcctaatgtcactaacatcgtacgagaaaccattgtaaatgagttaaggtcggaccctcgtatcgctgcgagcatccttcgtcttcacttccacgactgctttgttaatggttgtgacgcatccatcttgttagacaacacgacatcatttcgaacagagaaagatgcgtttggaaacgcaaattcggctcggggatttccagtgattgatagaatgaaagctgcggtggagagggcatgcccaagaaccgtttcatgcgcagatatgctcaccattgcagctcaacaatctgtcactttggcaggaggtccttcttggagggttcctttgggaaggagagacagtttacaagcattcctggaactcgctaatgcaaatcttccagctccattctttacacttccacaacttaaagccagcttcagaaatgttggtctcgatcgtccttctgatctcgttgctctctccggtggtcacacatttggtaaaaatcaatgtcagtttattcttgacagattatacaatttcagcaacacaggtttacccgaccctacactcaacactacttacctccaaactcttcgtggactatgcccccttaatggcaatcgaagtgccttggtagattttgatctacgtacgcctacggttttcgacaacaaatactacgtgaatctcaaagagcgaaaaggtcttatccagagcgaccaagagttgttctctagccccaatgccactgacacaatccccttggtgagagcatatgctgatggcacacaaacattcttcaatgcatttgtggaggcaatgaataggatgggaaacattacaccaactacaggaactcaaggacaaatcagattgaactgtagagttgtgaactccaactctctgctccatgatgtggtggatatcgttgactttgttagctctatgtga

SEQ ID NO: 213 - protein, 353 aa, Arabidopsis thaliana
MHFSSSSTSSTWTILITLGCLMLHASLSAAQLTPTFYDRSCPNVTNIVRETIVNELRSDPRIAASILRLHFHDCFVNGCDASILLDNTTSFRTEKDAFGNANSARGFPVIDRMKAAVERACPRTVSCADMLTIAAQQSVTLAGGPSWRVPLGRRDSLQAFLELANANLPAPFFTLPQLKASFRNVGLDRPSDLVALSGGHTFGKNQCQFILDRLYNFSNTGLPDPTLNTTYLQTLRGLCPLNGNRSALVDFDLRTPTVFDNKYYVNLKERKGLIQSDQELFSSPNATDTIPLVRAYADGTQTFFNAFVEAMNRMGNITPTTGTQGQIRLNCRVVNSNSLLHDVVDIVDFVSSM

SEQ ID NO: 214 - DNA, 2049 bp, Arabidopsis thaliana
  CDS (1)..(2049)
atggaagcatttcttaaggaattcggagattattatggatacccagatggtcccaagaacattcaagagatccgcgacaccgaattcaagagattagataaagattacagttgcttattcacctccggagccacagcagcgctgaagcttgtcggagagacttttccgtggacccaagacagtaattttttgtataccatggagaatcacaacagtgtacttggtattagggaatatgcattagctcaaggtgcttcagcatgtgcagtggatattgaagaggcagctaaccaaccaggccagcttacaaattcaggaccatctatcaaggtaaagcatcgtgctgtgcagatgagaaacacttctaaactccaaaaggaagagtcaagaggaaatgcctataatctatttgctttcccctcggagtgcaatttttctggcctgaggtttaatctagatctggtgaagttgatgaaagaaaatactgagaccgtgctacaaggctccccctttagcaagagcaagcggtggatggtcttgattgatgctgcaaagggttgtgctacactaccacctgatttatcggagtatcctgcagattttgttgttctgtcattctacaagttgtgtaaaatggttgaatttgtatggcatttgatgaacataatacttacaggcactgttgctgcttcaattgctgacatcgactttgtaaaaagaagggaaagggtggaggagttttttgaggatggttctgcttcattcctgagcatagcagccatccgtcatggcttcaaattactcaagtcgcttacaccttctgcaatttggatgcacacaacgtcactttccatatatgtgaaaaagaagcttcaggctttacgacatggaaacggggctgctgtatgtgttctgtatggcagtgaaaatctggagttatcttcacataaatcaggcccaacggttacattcaacttgaaaagacctgatggctcttggtttggctacttggaggtggagaagcttgcttctttatctggaattcagttacgggctgggcatatttgctgggatgacaatgatgtgataaatggaaaaccaacaggggctgttagggtttcgtttggttatatgtcaacctttgaagatgccaagaaatttattgatttcatcataagttcatttgcttcacctccaaagaagactgggaatggaaccgtcgtcagtggaaggtttcctcaacttcctagtgaagaccttgaaagtaaagaatcttttccaagccactaccttaagtcaattactgtatacccgatcaagtcatgtgctggattttctgtgatacgttggccactttgcagaacaggcctgctgcatgatcgagaatggatggttcagggtctgaccggtgaaattcttacccaaaagaaggtgcctgagatgtctcttataaaaacctttatcgaccttgaggaaggactactgtctgtagaatcttctcgctgcgaagacaagttgcacatcagaatcaagtctgattcatataacccgaggaacgatgagtttgattcacatgccaacatacttgaaaaccgtaatgaggaaactagaatcaatcgttggttcaccaatgccattggtcgacaatgcaagttgctacggtattctagctctacttccaaagactgcttgaacagaaacaagagtcctggtttgtgcagagatttggaaagcaatatcaactttgctaatgaagctcagttcttgttaatctccgaggagagtgttgctgacctaaacagaagattagaagcaaaagacgaggattacaaacgggctcatgaaaaactcaatccacataggttcagaccaaatctggttatatctggaggtgaaccatacggggaagataaatggaaaactgtcaagataggagacaatcatttcacaggaaagatcttgtttggaacgcttttgagatacgagattgatgagaaaagacaatgttggattggagttggggaagaagttaatccagatattgaataa

SEQ ID NO: 215 - protein, 682 aa, Arabidopsis thaliana
MEAFLKEFGDYYGYPDGPKNIQEIRDTEFKRLDKDYSCLFTSGATAALKLVGETFPWTQDSNFLYTMENHNSVLGIREYALAQGASACAVDIEEAANQPGQLTNSGPSIKVKHRAVQMRNTSKLQKEESRGNAYNLFAFPSECNFSGLRFNLDLVKLMKENTETVLQGSPFSKSKRWMVLIDAAKGCATLPPDLSEYPADFVVLSFYKLCKMVEFVWHLMNIILTGTVAASIADIDFVKRRERVEEFFEDGSASFLSIAAIRHGFKLLKSLTPSAIWMHTTSLSIYVKKKLQALRHGNGAAVCVLYGSENLELSSHKSGPTVTFNLKRPDGSWFGYLEVEKLASLSGIQLRAGHICWDDNDVINGKPTGAVRVSFGYMSTFEDAKKFIDFIISSFASPPKKTGNGTVVSGRFPQLPSEDLESKESFPSHYLKSITVYPIKSCAGFSVIRWPLCRTGLLHDREWMVQGLTGEILTQKKVPEMSLIKTFIDLEEGLLSVESSRCEDKLHIRIKSDSYNPRNDEFDSHANILENRNEETRINRWFTNAIGRQCKLLRYSSSTSKDCLNRNKSPGLCRDLESNINFANEAQFLLISEESVADLNRRLEAKDEDYKRAHEKLNPHRFRPNLVISGGEPYGEDKWKTVKIGDNHFTGKILFGTLLRYEIDEKRQCWIGVGEEVNPDIE

SEQ ID NO: 216 - DNA, 1074 bp, Arabidopsis thaliana; identical to SEQ ID NO: 99
  CDS (1)..(1074)

SEQ ID NO: 217 - protein, 357 aa, Arabidopsis thaliana; identical to SEQ ID NO: 100

SEQ ID NO: 218 - DNA, 1899 bp, Arabidopsis thaliana; identical to SEQ ID NO: 59
  CDS (1)..(1899)

SEQ ID NO: 219 - protein, 632 aa, Arabidopsis thaliana; identical to SEQ ID NO: 60

SEQ ID NO: 220 - DNA, 465 bp, Arabidopsis thaliana; identical to SEQ ID NO: 61
  CDS (1)..(465)

SEQ ID NO: 221 - protein, 154 aa, Arabidopsis thaliana; identical to SEQ ID NO: 62

SEQ ID NO: 222 - DNA, 3312 bp, Arabidopsis thaliana; identical to SEQ ID NO: 63
  CDS (1)..(3312)

SEQ ID NO: 223 - protein, 1103 aa, Arabidopsis thaliana; identical to SEQ ID NO: 64

SEQ ID NO: 224 - DNA, 2703 bp, Arabidopsis thaliana; identical to SEQ ID NO: 97
  CDS (1)..(2703)

SEQ ID NO: 225 - protein, 900 aa, Arabidopsis thaliana; identical to SEQ ID NO: 98

SEQ ID NO: 226 - DNA, 771 bp, Arabidopsis thaliana; identical to SEQ ID NO: 103
  CDS (1)..(771)

SEQ ID NO: 227 - protein, 256 aa, Arabidopsis thaliana; identical to SEQ ID NO: 104

SEQ ID NO: 228 - DNA, 1767 bp, Arabidopsis thaliana; identical to SEQ ID NO: 15
  CDS (1)..(1767)

SEQ ID NO: 229 - protein, 588 aa, Arabidopsis thaliana; identical to SEQ ID NO: 16

SEQ ID NO: 230 - DNA, 648 bp, Arabidopsis thaliana; identical to SEQ ID NO: 17
  CDS (1)..(648)

SEQ ID NO: 231 - protein, 215 aa, Arabidopsis thaliana; identical to SEQ ID NO: 18

SEQ ID NO: 232 - DNA, 2466 bp, Arabidopsis thaliana; identical to SEQ ID NO: 105
  CDS (1)..(2466)

SEQ ID NO: 233 - protein, 821 aa, Arabidopsis thaliana; identical to SEQ ID NO: 106

SEQ ID NO: 234 - DNA, 1020 bp, Arabidopsis thaliana
  CDS (1)..(1020)
atgggtggtgagagtaatgaaggaggagagatgggctttaagcatggagatgatgagagtggtgggatctctagagttggaattacatcaatgcccttgtatgcaaaggcagatcctttcttctcttctgcagattgggatccagttgtcaatgctgctgctgctggcttctccagctctcattaccatccttccatggcgatggataatccagggatgagttgcttctctcattaccaacccggttctgtttccggttttgcagcagacatgcctgctagtcttcttccgtttggtgattgtggtggtggtcaaattggtcattttcttggttcagacaagaaaggggaaagattgatcagagctggagaatcatctcatgaggatcatcatcaggtttcagatgatgctgttcttggtgcttccccagttgggaaaagaaggctacctgaagccgaatcacaatggaacaagaaagctgtggaggaatttcaagaagaccctcaaaggggaaatgatcagagccagaagaagcataaaaatgatcagagtaaagagacggtgaacaaggagagctcacaaagtgaagaagcaccgaaagaaaactacattcatatgagggcaagaagaggtcaagccactaatagtcacagtcttgcagagcggatcaccggaaaagcggttatgctcgatgaaataatcaactatgttcagtcattgcaacagcaagttgagtttttgtctatgaaacttgcgacggtgaatccagagatcaatattgatatagacaggattctcgccaaagatcttctgcagtcaagagacagaaacactcctacactcgggctgaatccttttgccggttttcaagggaacataccaaacctttctgccaccacaaatccacaatacaacccactacctcagacaacactagagagtgaactacaaaacctttaccagatgggattcgtctcaaatccatcgactatgtccagtttctcacctaatggtaactaa

SEQ ID NO: 235 - protein, 339 aa, Arabidopsis thaliana
MGGESNEGGEMGFKHGDDESGGISRVGITSMPLYAKADPFFSSADWDPVVNAAAAGFSSSHYHPSMAMDNPGMSCFSHYQPGSVSGFAADMPASLLPFGDCGGGQIGHFLGSDKKGERLIRAGESSHEDHHQVSDDAVLGASPVGKRRLPEAESQWNKKAVEEFQEDPQRGNDQSQKKHKNDQSKETVNKESSQSEEAPKENYIHMRARRGQATNSHSLAERITGKAVMLDEIINYVQSLQQQVEFLSMKLATVNPEINIDIDRILAKDLLQSRDRNTPTLGLNPFAGFQGNIPNLSATTNPQYNPLPQTTLESELQNLYQMGFVSNPSTMSSFSPNGN

SEQ ID NO: 236 - DNA, 2997 bp, Arabidopsis thaliana
  CDS (1)..(2997)
atggaagacgcctacgccagatctgtctcagaggtgcttgatttctttggggtagacccaacaaagggtctttctgattctcaggttgttcatcattccaggctttatggcaggaatgtactgcctgaagagaaaagaacgccattctggaaactggttctgaaacagtttgatgatttacttgtcaagatattgattgtggctgcaattgtttctttcgtattggctttggctaatggagagactggtttaacagcatttctggagccttttgtcattctgctgatattggctgcaaatgcggcagtgggggtgatcacggagactaatgctgagaaggctcttgaggagctacgtgcctaccaagcaaatatagctacagtgttgcgaaatgggtgcttctctatcctaccagcaacagagctggttccaggcgacattgttgaagttactgtgggatgtaagattccagctgacctgaggatgattgagatgtctagcaatacgtttcgagttgatcaagccattctaactggtgaaagctgttccgtggaaaaagatgttgactgtactttaacaacaaatgctgtctaccaagacaagaaaaatattttattttcgggaactgatgtggtcgcgggtaggggaagggctgttgtcattggagttggttcaaacaccgcaatgggtagcatacacgattctatgttgcagacagatgatgaggcaactccattgaaaaagaagctggacgagtttggcagctttttggctaaggtaattgcgggtatttgtgtacttgtgtgggttgtcaacattggtcacttcagtgacccttctcatggtggattttttaaaggcgcaattcactattttaagattgcagttgcccttgctgttgcagctattcctgaaggacttcctgctgtcgtgacaacgtgtttagctcttggaacaaagaaaatggctcgtttgaatgctattgtacggtcattaccatctgtcgagacgcttgggtgcactactgtaatttgcagtgacaagactggaacattgacaaccaatatgatgtcggtgtctaagatatgtgtagtccaatctgcagagcatggtcctatgattaatgaattcactgttagtgggacaacttatgcaccagaaggtaccgtctttgacagcaatgggatgcagcttgacttacctgctcagtcaccttgccttcatcatttagcaatgtgttcatcactctgcaatgactccatcttgcaatacaatccagataaggattcttatgaaaaaattggagagtcaactgaagttgctcttcgagttcttgcagaaaaggttgggctccctggttttgattcaatgccttctgctctaaacatgttgagcaagcatgaacgtgcatcatattgcaaccattattgggaaaaccaattcaaaaaggtttatgttttggagtttactcgtgaccgaaaaatgatgagcgtcctatgtagccataagcaaatggatgttatgttctcaaagggtgctccagagagtataatagctaggtgtaataaaattctctgcaacggtgatggttctgttgttcctctaactgctgctggccgtgcagagcttgagtcgaggttttacagttttggcgatgaaacattgagatgcttagcattagcatttaagaccgtgccccacggtcaacaaactatttcctatgataatgagaacgacctgacgtttattgggttggtgggaatgcttgatccaccaagagaagaagtgagagatgctatgcttgcgtgtatgactgctgggatacgtgttatagttgttactggggataacaagtccacagcagagtcactatgtagaaaaataggggcttttgacaatctggtagacttttctggtatgtcctacaccgcttctgaatttgaacggcttccagcagtgcagcaaactctagcattgcgacggatgacacttttttccagggttgaaccttcccacaaaaggatgcttgttgaagccctacagaaacaaaacgaagtggtggcaatgactggtgatggcgttaatgatgcccctgcattgaagaaagctgacattgggattgccatgggttctggaacagctgtagcaaagagtgcttcagatatggttttggctgatgataattttgcttcaatagttgcggctgttgcagaaggaagggctatatataataacacaaagcaattcattagatacatgatttcttcaaatataggggaagtggtctgtatatttgttgcagctgtactgggaatccctgataccttggcacctgttcaacttctgtgggtcaatttggtaacagatggattgcctgccactgccattggctttaataaacaagattccgatgttatgaaggcaaaaccccgaaaggttggtgaagcagtggtcactgggtggttattcttccgctatttggttatcggagtttatgtcggcctggccactgttgctggctttatatggtggtttgtttactctgatggtggtcctaaacttacttacagtgaactgatgaactttgaaacttgcgcacttagagagacaacttatccctgcagcatatttgaggatcggcacccatctactgtggctatgacagtacttgttgttgtcgagatgtttaatgctctaaataacctcagcgaaaatcaatcccttctggttataaccccaaggagtaacttatggcttgttggttcaattatcctgacgatgcttctgcacgtgctaatattatatgttcatccactggcagtcttattttctgtcacgccattatcctgggccgagtggactgctgttctgtatctttcgtttccagttatcatcatcgatgagcttctgaagttcctctctagaaatacaggcatgagattcaggttcagattgaggaaggctgatttactccccaaggaccggcgtgacaagtag

SEQ ID NO: 237 - protein, 998 aa, Arabidopsis thaliana
MEDAYARSVSEVLDFFGVDPTKGLSDSQVVHHSRLYGRNVLPEEKRTPFWKLVLKQFDDLLVKILIVAAIVSFVLALANGETGLTAFLEPFVILLILAANAAVGVITETNAEKALEELRAYQANIATVLRNGCFSILPATELVPGDIVEVTVGCKIPADLRMIEMSSNTFRVDQAILTGESCSVEKDVDCTLTTNAVYQDKKNILFSGTDVVAGRGRAVVIGVGSNTAMGSIHDSMLQTDDEATPLKKKLDEFGSFLAKVIAGICVLVWVVNIGHFSDPSHGGFFKGAIHYFKIAVALAVAAIPEGLPAVVTTCLALGTKKMARLNAIVRSLPSVETLGCTTVICSDKTGTLTTNMMSVSKICVVQSAEHGPMINEFTVSGTTYAPEGTVFDSNGMQLDLPAQSPCLHHLAMCSSLCNDSILQYNPDKDSYEKIGESTEVALRVLAEKVGLPGFDSMPSALNMLSKHERASYCNHYWENQFKKVYVLEFTRDRKMMSVLCSHKQMDVMFSKGAPESIIARCNKILCNGDGSVVPLTAAGRAELESRFYSFGDETLRCLALAFKTVPHGQQTISYDNENDLTFIGLVGMLDPPREEVRDAMLACMTAGIRVIVVTGDNKSTAESLCRKIGAFDNLVDFSGMSYTASEFERLPAVQQTLALRRMTLFSRVEPSHKRMLVEALQKQNEVVAMTGDGVNDAPALKKADIGIAMGSGTAVAKSASDMVLADDNFASIVAAVAEGRAIYNNTKQFIRYMISSNIGEVVCIFVAAVLGIPDTLAPVQLLWVNLVTDGLPATAIGFNKQDSDVMKAKPRKVGEAVVTGWLFFRYLVIGVYVGLATVAGFIWWFVYSDGGPKLTYSELMNFETCALRETTYPCSIFEDRHPSTVAMTVLVVVEMFNALNNLSENQSLLVITPRSNLWLVGSIILTMLLHVLILYVHPLAVLFSVTPLSWAEWTAVLYLSFPVIIIDELLKFLSRNTGMRFRFRLRKADLLPKDRRDK

SEQ ID NO: 238 - DNA, 1632 bp, Arabidopsis thaliana; identical to SEQ ID NO: 23
  CDS (1)..(1632)

SEQ ID NO: 239 - protein, 543 aa, Arabidopsis thaliana; identical to SEQ ID NO: 24

SEQ ID NO: 240 - DNA, 786 bp, Arabidopsis thaliana
  CDS (1)..(786)
atgtggttgatgcagtaccttgtgacacattttagcgactttcaactggcatgtattgggagttttctcctccatgaaagcgtgtttttcttatctggactccctttcatttttcttgaaaggcaaggctttctcagcaagtacaaaattcagacaaaaaataacacacctgcagcccaaggaaaatgtattactcgcctgttgctttatcatttctccgtaaacttgcccctgatgttggcctcctaccctgtcttccgagccatgggaatgcgaagcagttttcctctgccgtcctggaaagaagtgtctgcccagatattattctactttatcattgaggattttgtcttctattggggtcatcggatcttgcattcaaaatggctgtacaagaacgtgcatagtgtgcatcatgaatatgccacaccatttggtttgacatcagaatatgctcaccccgctgagattctatttctgggttttgctaccatagtcggtccagctcttactggccctcacctaattactctctggttatggatggtgttgagagtgctggagacagttgaggcacattgtggttatcatttcccatggagcctctcaaattttcttcctctgtatggaggtgctgacttccatgactaccatcaccgactgctatacacaaagtccggaaactactcttcaacttttgtgtatatggactggatctttggtactgacaaggggtacagaagactgaagacccttaaagaaaacggtgacatgaaacaaacgtga

SEQ ID NO: 241 - protein, 261 aa, Arabidopsis thaliana
MWLMQYLVTHFSDFQLACIGSFLLHESVFFLSGLPFIFLERQGFLSKYKIQTKNNTPAAQGKCITRLLLYHFSVNLPLMLASYPVFRAMGMRSSFPLPSWKEVSAQILFYFIIEDFVFYWGHRILHSKWLYKNVHSVHHEYATPFGLTSEYAHPAEILFLGFATIVGPALTGPHLITLWLWMVLRVLETVEAHCGYHFPWSLSNFLPLYGGADFHDYHHRLLYTKSGNYSSTFVYMDWIFGTDKGYRRLKTLKENGDMKQT

SEQ ID NO: 242 - DNA, 696 bp, Arabidopsis thaliana
  CDS (1)..(696)
atggcgaatagaatagatcatgagtacgattacttgttcaagatcgtcctgatcggcgattccggtgttggtaaatccaacattctctctcgattcaccagaaacgagttctgtctcgaatccaaatccaccattggcgtcgaattcgccacccggactttacaggtcatctctcttctctcgctttctctaaatctagacaatttccctccagatcaatttggcaaaacagtgaaggctcagatttgggacactgcaggtcaagagcgttatcgagcaatcacaagtgcttactacagaggagctgttggagctcttcttgtctacgacataaccaagagacaaacttttgagaatgtcttgagatggttacgtgagctaagggatcatgctgattccaacattgttatcatgatggctggaaacaaatcagacctgaatcacttgagatctgttgctgatgaagatggtcgctctctcgccgagaaggaaggtttgtcgtttctcgagacatctgctttagaagcgactaacatcgagaaagcgtttcagaccattttgtctgagatttatcatatcataagcaagaaagctttagcggcacaagaagctgcaggtaatcttccgggccaaggaacagcgatcaatatatcagattcatctgcaactaacagaaaaggatgctgttctacctaa

SEQ ID NO: 243 - protein, 231 aa, Arabidopsis thaliana
MANRIDHEYDYLFKIVLIGDSGVGKSNILSRFTRNEFCLESKSTIGVEFATRTLQVISLLSLSLNLDNFPPDQFGKTVKAQIWDTAGQERYRAITSAYYRGAVGALLVYDITKRQTFENVLRWLRELRDHADSNIVIMMAGNKSDLNHLRSVADEDGRSLAEKEGLSFLETSALEATNIEKAFQTILSEIYHIISKKALAAQEAAGNLPGQGTAINISDSSATNRKGCCST

SEQ ID NO: 244 - DNA, 7608 bp, Arabidopsis thaliana; identical to SEQ ID NO: 27
  CDS (1)..(7608)

SEQ ID NO: 245 - protein, 2535 aa, Arabidopsis thaliana; identical to SEQ ID NO: 28

SEQ ID NO: 246 - DNA, 3774 bp, Arabidopsis thaliana; identical to SEQ ID NO: 29
  CDS (1)..(3774)

SEQ ID NO: 247 - protein, 1257 aa, Arabidopsis thaliana; identical to SEQ ID NO: 30

SEQ ID NO: 248 - DNA, 3513 bp, Arabidopsis thaliana; identical to SEQ ID NO: 33

SEQ ID NO: 249 - protein, 321 aa, Arabidopsis thaliana; identical to SEQ ID NO: 32

SEQ ID NO: 250 - DNA, 1374 bp, Arabidopsis thaliana
  CDS (1)..(1374)
atgaagctttattctgtttccatcatcatcttcgtcttaattgctctctccaccatagttaatgctcaacaagctgctacagattcctgcaactcaactctacctctcaacgacctcaccttcaacaccagcctccttcaatgcaccgaagcttggactccccaaaatttcatcctccgatatgcaagaacggcagagaacacatggagctttatcttatcggcgccggattcaagcgctttcatcgggatcggattctctaccaacggtcagatgatcggaagcagcgcgatcgttggttggataccttccgacggcggttccgggactgtgaaaccgtacttgctcggtgggaaatctcccggagaggttaatcctgaccaaggagatctaacgatcgtcaacggctcgttgaagatcgaatcagtgtcgtcgcgtctttacatgagatttcaattgacggcgacgctgccgcggcagagtcttctttacgctgtgggacctgccggattcttcccatcttcgccggattttaggttgagagagcaccgcttcgtgaccaccacgaccatcaattataatacaggttcgcaaagtgtggttaaagtttcaccacactctaagctaaagaagacacatgggctaatgaacatgttcggctggggaatattgattatcgttggcgccatagtggctcgacatatgaagcaatgggaccccacttggttctatgcccatatcgctctccaaaccactggttttctcctcggtttaactggtgtcatttgcggtttggttcttgaaaaccggctcaaggccaataatgtttccaagcacaaaggcctcgggataaccatacttgtcatgggcgttcttcagatgctggcattgctagctcggccggataagcaatcgaaatacagaaaatattggaattggtatcatcataacataggaagacttctgatcatactggctatttctaacatcttctacggtattcatttggctaaagctggaactagttggaatggtggttacggttttgcggtcgcggtcttggccttgacggctattggattagaagttagaaagttcttgaaaaaaaattggaagaagaagaagaaagagatgttgagaactcgccttctctggtttacgcttggtttttccgtgaccggaggttccattgctcatatcgtgtggcgtgatctctatgccgaacgtttcgctatttcttctgatatgaaggagaaattcagtgctctggaaggtagagtatcaggtttggagtctggtggttatgagaacccgaatccagctcaggtcagctctttctctacctctctccctccattcgtaactatgatttga

SEQ ID NO: 251 - protein, 457 aa, Arabidopsis thaliana
MKLYSVSIIIFVLIALSTIVNAQQAATDSCNSTLPLNDLTFNTSLLQCTEAWTPQNFILRYARTAENTWSFILSAPDSSAFIGIGFSTNGQMIGSSAIVGWIPSDGGSGTVKPYLLGGKSPGEVNPDQGDLTIVNGSLKIESVSSRLYMRFQLTATLPRQSLLYAVGPAGFFPSSPDFRLREHRFVTTTTINYNTGSQSVVKVSPHSKLKKTHGLMNMFGWGILIIVGAIVARHMKQWDPTWFYAHIALQTTGFLLGLTGVICGLVLENRLKANNVSKHKGLGITILVMGVLQMLALLARPDKQSKYRKYWNWYHHNIGRLLIILAISNIFYGIHLAKAGTSWNGGYGFAVAVLALTAIGLEVRKFLKKNWKKKKKEMLRTRLLWFTLGFSVTGGSIAHIVWRDLYAERFAISSDMKEKFSALEGRVSGLESGGYENPNPAQVSSFSTSLPPFVTMI

SEQ ID NO: 252 - DNA, 1245 bp, Arabidopsis thaliana
  CDS (1)..(1245)
atgcaaacagtgaaagctttgaggagagtgagtgaacccttacaatgggttcggtctgtttcttatggaagacgcttttctgctctcccaaactattccgcatcagatgcagatttcgaagaccaggttctggtggaaggaaaagctaaatcaagagctgccattctcaataacccatcttctctcaatgctctttctgcgcctatggtattgtgttcaccagattatgcttcaaaaacttttgccttggtaggttggtcggttaaagaggctatacgaatcatgggaagagaacccagctatttcctttgttttgatgaaggaaatactgaagaatctaaactctttttcgagaacttgtacaagtttgtatacctccaaggaacgtatttaaaaccaaatatagcaataatggatggtgtgaccatgggttgtggtggtggaatttcacttccagggatgtttcgtgtggctacagataaaactgtgttggcccatccagaggtccaaattggttttcatcctgatgcaggagcttcctattatctttcacggcttcctggttatttaggggaatacttggctctaacggggcagaaacttaatggtgtcgaaatgatagcatgtggccttgccacccactattgcttaaacgcgagacttccgttgattgaagagaggattggtaaactgttgaccgatgatcctgctgtcattgaggattctcttgctcaatatggtgatcttgtttaccctgacagtagcagcgtactgcacaagatagagttgattgataaatattttgggcttgataccgttgaagaaatcattgaagctatggaaaatgaagctgctaattcgtgcaatgaatggtgcaagaaaactctcaaacagatcaaagaagcttcacctttgagcttaaagattactttgcaatctatacgagaaggtagattccaaacccttgatcaatgtctcacacatgaataccgtatatccatttgtggagtctcaaaagtagtctctggcgacttttgcgagggtattcgagcccgtttggtagataaagactttgctccaaaggtgcatacaaacatatcagcctcaaaattagactgggatcctccacgcctagaagatgtgagcaaagacatggtggattgctacttcacgccagcctcagagctcgatgattcagattctgagttgaagctgccaacagctcaacgagagccttatttttga

SEQ ID NO: 253 - protein, 414 aa, Arabidopsis thaliana
MQTVKALRRVSEPLQWVRSVSYGRRFSALPNYSASDADFEDQVLVEGKAKSRAAILNNPSSLNALSAPMVLCSPDYASKTFALVGWSVKEAIRIMGREPSYFLCFDEGNTEESKLFFENLYKFVYLQGTYLKPNIAIMDGVTMGCGGGISLPGMFRVATDKTVLAHPEVQIGFHPDAGASYYLSRLPGYLGEYLALTGQKLNGVEMIACGLATHYCLNARLPLIEERIGKLLTDDPAVIEDSLAQYGDLVYPDSSSVLHKIELIDKYFGLDTVEEIIEAMENEAANSCNEWCKKTLKQIKEASPLSLKITLQSIREGRFQTLDQCLTHEYRISICGVSKVVSGDFCEGIRARLVDKDFAPKVHTNISASKLDWDPPRLEDVSKDMVDCYFTPASELDDSDSELKLPTAQREPYF

SEQ ID NO: 254 - DNA, 1497 bp, Arabidopsis thaliana; identical to SEQ ID NO: 111
  CDS (1)..(1497)

SEQ ID NO: 255 - protein, 498 aa, Arabidopsis thaliana; identical to SEQ ID NO: 112

SEQ ID NO: 256 - DNA, 780 bp, Arabidopsis thaliana; identical to SEQ ID NO: 35
  CDS (1)..(780)

SEQ ID NO: 257 - protein, 259 aa, Arabidopsis thaliana; identical to SEQ ID NO: 36

SEQ ID NO: 258 - DNA, 1224 bp, Arabidopsis thaliana
  CDS (1)..(1224)
atggcggtggaaacaatgtcgatgggatcagattcatcaactttgattctaacatcaggagcaagcggtcgcgttagggtactcttctcgatgcgagagcttaagcgtctcgttacgattatccaatcgttgattcttttcctcctccttccgtttcgcgtcgtcgtttggcggcggaggactggtgcggtggttatcagagacgataagcaagagaggaaggtttggtctcctccgcagatcgtggtgaggaagaggaacatcggtggcgaaagcagcgtttctcctccgtcggttccagctgcggtggtggatggggaggttgctgttcgacgtgaactggcgattaagcgagttttggaggatgaaggcggcgatggaagctccgtcagagattattcgctattcacgacgaagagaggagatacgttgtttagtcagtcatggtcacctctttccccaaatcacaggggacttattgttctgctacatggattaaacgagcataggtatagtgattttgcaaagcagcttaatgctaatgggttcaaggtctatggaattgactggatcggtcatggcggaagtgatggacttcatgcttacgttccttcccttgattacgctgtcacagatttgaaatcatttcttgaaaaggtattcacagagaatccaggactcccctgtttctgctttggacactcaacaggtggagcaatcatcctcaaggctatgctggatccaaagattgaatctcgagtttcaggcattgcattgacttcaccagctgttggagtccaaccatcccatccaatcttcgctgttcttgctccaatcatggcgtttctactacccaggtaccaaatcagtgcagcaaacaagaaaggaatgccggtttctcgtgacccagcagctctcatcgccaaatactctgacccattagtcttcaccggatccatccgggttaaaaccggctacgagatccttagaatcactgctcacttgcaacagaacctgaacaaagtgaaagttccctttcttgtgatgcacggtactgacgacacagttaccgatcctagcgcctcaaagaagctctacgaggaagctgcctcgtcagacaaatcactcaagctctacgacgggttgttgcacgatcttctttttgaacccgaacgagaaatcatcgctggagccatattagattggctaaaccagcgggtttag

SEQ ID NO: 259 - protein, 407 aa, Arabidopsis thaliana
MAVETMSMGSDSSTLILTSGASGRVRVLFSMRELKRLVTIIQSLILFLLLPFRVVVWRRRTGAVVIRDDKQERKVWSPPQIVVRKRNIGGESSVSPPSVPAAVVDGEVAVRRELAIKRVLEDEGGDGSSVRDYSLFTTKRGDTLFSQSWSPLSPNHRGLIVLLHGLNEHRYSDFAKQLNANGFKVYGIDWIGHGGSDGLHAYVPSLDYAVTDLKSFLEKVFTENPGLPCFCFGHSTGGAIILKAMLDPKIESRVSGIALTSPAVGVQPSHPIFAVLAPIMAFLLPRYQISAANKKGMPVSRDPAALIAKYSDPLVFTGSIRVKTGYEILRITAHLQQNLNKVKVPFLVMHGTDDTVTDPSASKKLYEEAASSDKSLKLYDGLLHDLLFEPEREIIAGAILDWLNQRV

SEQ ID NO: 260 - DNA, 1401 bp, Arabidopsis thaliana; identical to SEQ ID NO: 39
  CDS (1)..(1401)

SEQ ID NO: 261 - protein, 466 aa, Arabidopsis thaliana; identical to SEQ ID NO: 40

SEQ ID NO: 262 - DNA, 519 bp, Arabidopsis thaliana; identical to SEQ ID NO: 41
  CDS (1)..(519)

SEQ ID NO: 263 - protein, 172 aa, Arabidopsis thaliana; identical to SEQ ID NO: 42

SEQ ID NO: 264 - DNA, 954 bp, Arabidopsis thaliana; identical to SEQ ID NO: 43
  CDS (1)..(954)

SEQ ID NO: 265 - protein, 317 aa, Arabidopsis thaliana; identical to SEQ ID NO: 44

SEQ ID NO: 266 - DNA, 1465 bp, Arabidopsis thaliana
  CDS (39)..(1310)
atggcggcggcgatgatttcgtcttccgtcgtcagctcatgaaactaaatctctcgaatctcagatttctacgtacccgaaaatcgttaatctcccagacgcgagcaatgactcaaaatccggatccaaaacctgatccatcgcaggttctagacgatatcctctgttcggagcagcgtgatgggcagattgaggaaacagtcgacacagcgccggcgagcttgggctctccaagtcgggtcttaagcattgatactagagtagagagagcttgggcacactggaaaaaactgggtagacccaagtatatcgttgctccaatggttgataactctgagcttccgtttagattgctctgccagaaatacggagctcaggctgcttatactccgatgttgcattctaggatcttcaccgagactgagaagtatagaaatcaggagttcaccacctgtaaggaggacaggccattgtttgtgcagttctgtgctaatgatcctgatacgttattggaagctgcaaagagagtcgaaccttactgcgactatgttgatatcaatttagggtgtcctcagcgtatagcgaggcgaggaaattatggtgcattcttgatggataatcttcctttggtgaaatcacttgttgaaaagttagctcagaacctcaatgttcctgtctcctgtaaaatccggatcttcccgaacctggaagatacactcaagtacgccaagatgctagaagatgctggttgctcgctcctagctgttcacgggcgaacaagagatgagaaagacgggaagaaatttagagctgattggagcgcaatcaaggaagtgaaaaacgctatgagaatccctgtcttagcgaatgggaatgtaagatgcatcgaagatgtcgataactgcatcaaagagacgggtgttgaaggtgttctctctgcggagacgcttcttgaaaacccggcggcctttgctgggtttagaacagctgaatgggcaaaagataacgaagaagagggattcgtcgatggagggttagaccagggagatttagttgttgagtatttaaagctgtgtgagaagcatccggttccatggaggatgattcgatctcacgttcataagatgttgggagaatggtttagaattcatccacaagttagagagcaacttaatgctcaaaacatattgacgtttgagtttctatacggacttgtggatcagctaagagagcttggaggaagagttccactctacaagaaaaagaagatagatactctgactccacaagactctccacaaagggtttagagagttgaaactatacgttcttgattcattgggttttatcatttatgttgtaacaccaaatcatcagtatccaaatactatagtggtattttaaacgaattgttgtacctcgaagagatattttgaaattttaattgatctgattgaattttcac

SEQ ID NO: 267 - protein, 423 aa, Arabidopsis thaliana; identical to SEQ ID NO: 46

SEQ ID NO: 268 - DNA, 777 bp, Arabidopsis thaliana; identical to SEQ ID NO: 47
  CDS (1)..(777)

SEQ ID NO: 269 - protein, 258 aa, Arabidopsis thaliana; identical to SEQ ID NO: 48

SEQ ID NO: 270 - DNA, 3021 bp, Arabidopsis thaliana
  CDS (1)..(3021)
atgatgaaagcaaaacaactactcgtggttggacttttgttgtctctactccttttaatcattcacacaacagagtccatatcagactatgaagtgaagtcaaacgttaacgtagaagctttaaccgtagaggagcaaaagcaatcaaacagaggaagacgcagcagtggtagcagtcgtaatcgcggacgcagaagctgcgatcctctgtatcaatacttgttcgacacctgtggtcattggccttttcctacaactccttcgccggaaaacccttttctaccattccaaccaccgcgtccaccaccacgtccgagaccgcgtccaaggccatccccacgtctaccgccacctttggttccatcacccccaccaccactgcatccaaggccgtccccatgcccaccaccgcttatgccgtctccaccgcctttggttccatcaccaccaccacctcctccttcaccgctcgttccttcacctcctcctccctctccgccaccatttttcttcttcccttcaccgcccccgccggtgatagtgtttccgccccctttggtgccgtctcctccgccgccactaccaggtggtgatcagacgacacaacctccgccgttatggctacctccgccaccatttggagacgaaacgccgccagtgttctctcttccaccgccgttggatgagtttccacctatgccaccaataacatggttgcctcctccggatgttcccgcccaaacctcgtccgcagaggcctttgatcagattcctccacttgttacaataacagaagcaattgagaatccacacaacagtcacagacacagagacgaaaacaagaaaggtttagatagaaggaatagaagagtcaaaagcagaagaagaagccgaagtagaaacggagaagcattctcaacaaggtgtgacgtgtttttccggtgcattttcggaacttgcggtcaatggaatttcccgattgacccttgtcctcaaaaccctttcttgccacctccggcgaccttaccaccacctcttccccttccgcccccaccgtcactcccagtcacaccttgctcaccacctccgcctccgatcatagtcaacggtgcaccaccaccaccgtgtgttacttgtgtacaagtatcacctccaccgccaactccggttccttgctcaccaccaccgcctcctccgattccggttccttgcccacctccaccatctccaccaccaccgcctcctccgcagccttgcattacttgtgtcacagccccagcaccgcctcctccccagccttgcattacttgtgtaatagccccagcatcacctcctccgcagccttgcattacttgtgtagcagccccggaaccgcctcctccccagccttgcataacttgcatcccagcaccagcttcaccgccgccagtaccgccggtgataccatttgtccctacgccgatttttatactccctccattgccgcctttatttcctgttctaccaccaccatctgtgacgccttctccggtgctaccccttcctccaccttctgcgcctcttccaccaccattatcttcctctcttccctcaccacctcttccattagttttatcaccaccaccacctctacctggcggcacggtttcacagccaccatttacaatgacaccgcctcctcttttaggtggtggcgctccgggaaccacagattcacctcctccgcctcttttaggcagtggcgctccgggaatcactggttcccctcctcctcctcttttaggcggtggagctccgggaatcactggttcacctcctcctcctcttttaggcggcggagctccgggaatcactggttcaccccctcctcctcttttaggcggcggagctccgggaatcactggttcaccccctcctcctcttttaggcggcggagctccgggaatcactggttcacctcctcctcctctttttggcggcggagctccgggaatcactggttcacctcctccacctctttttggcggcggagctccaggaatcgctggttcaccccctcctcctcttataggcggtggtgctccgggaatcaccgtttctcctcctcctctattaggtggcggagctccgggaatcaccggttcacctcctccgcctctagtcgcagacgtcccgcccatgccaccactagcatggttttcgccgcctgatattactactggatcaccaccaccatctccagttttcctccttcctccgcctttagaccggtcaacattaacgccaccagctgcacctgtagacaatctcccaccggttataatcacgggatctcctccaccagtaaacaatctcccaccggatatagtcatcggacaaccgccaccacctgatgtaaccattgaaccgcctattgaccagtcaacattaacgccaccagtcattcccgtgactttgcctccaccggttcaagaccttccttcgattttacctcccccggctgatgagttgccgccaccggttcaagaattccctccgattttgcctccaccggttcaagatttccccccaattctcgctcccccggctgatgagttcccgccaaatttgcctccaccggttctagaattccctccgattatgcctccaccggttcaagatttcccgccaattctcactccaccggctgaagagttcccgccgattttgcctccaccggttcaagagatcccgccggttttcacattaccaccgaccgtacaagatccaccgacaattccagtattctccacaccaccagtcctcggagatttcccaccccaaactcccgactttaccacgccgccagaggtcacaaatccatggcaaccgccggtgacgtcattcgcaccaccaatagagtccatcccaacaataccggataatccgtttccggttacaccaaacccggacatgggttcaaatcaaccgtttgttgagcttcctccgcctacttgggattccccgccatttaatcgttaa

SEQ ID NO: 271 - protein, 1006 aa, Arabidopsis thaliana
MMKAKQLLVVGLLLSLLLLIIHTTESISDYEVKSNVNVEALTVEEQKQSNRGRRSSGSSRNRGRRSCDPLYQYLFDTCGHWPFPTTPSPENPFLPFQPPRPPPRPRPRPRPSPRLPPPLVPSPPPPLHPRPSPCPPPLMPSPPPLVPSPPPPPPSPLVPSPPPPSPPPFFFFPSPPPPVIVFPPPLVPSPPPPLPGGDQTTQPPPLWLPPPPFGDETPPVFSLPPPLDEFPPMPPITWLPPPDVPAQTSSAEAFDQIPPLVTITEAIENPHNSHRHRDENKKGLDRRNRRVKSRRRSRSRNGEAFSTRCDVFFRCIFGTCGQWNFPIDPCPQNPFLPPPATLPPPLPLPPPPSLPVTPCSPPPPPIIVNGAPPPPCVTCVQVSPPPPTPVPCSPPPPPPIPVPCPPPPSPPPPPPPQPCITCVTAPAPPPPQPCITCVIAPASPPPQPCITCVAAPEPPPPQPCITCIPAPASPPPVPPVIPFVPTPIFILPPLPPLFPVLPPPSVTPSPVLPLPPPSAPLPPPLSSSLPSPPLPLVLSPPPPLPGGTVSQPPFTMTPPPLLGGGAPGTTDSPPPPLLGSGAPGITGSPPPPLLGGGAPGITGSPPPPLLGGGAPGITGSPPPPLLGGGAPGITGSPPPPLLGGGAPGITGSPPPPLFGGGAPGITGSPPPPLFGGGAPGIAGSPPPPLIGGGAPGITVSPPPLLGGGAPGITGSPPPPLVADVPPMPPLAWFSPPDITTGSPPPSPVFLLPPPLDRSTLTPPAAPVDNLPPVIITGSPPPVNNLPPDIVIGQPPPPDVTIEPPIDQSTLTPPVIPVTLPPPVQDLPSILPPPADELPPPVQEFPPILPPPVQDFPPILAPPADEFPPNLPPPVLEFPPIMPPPVQDFPPILTPPAEEFPPILPPPVQEIPPVFTLPPTVQDPPTIPVFSTPPVLGDFPPQTPDFTTPPEVTNPWQPPVTSFAPPIESIPTIPDNPFPVTPNPDMGSNQPFVELPPPTWDSPPFNR

SEQ ID NO: 272 - DNA, 3021 bp, Arabidopsis thaliana; identical to SEQ ID NO: 270
  CDS (1)..(3021)

SEQ ID NO: 273 - protein, 1006 aa, Arabidopsis thaliana; identical to SEQ ID NO: 271

SEQ ID NO: 274 - protein, 839 aa, Arabidopsis thaliana; identical to SEQ ID NO: 102

SEQ ID NO: 275 - DNA, 816 bp, Arabidopsis thaliana; identical to SEQ ID NO: 71
  CDS (1)..(816)

SEQ ID NO: 276 - protein, 271 aa, Arabidopsis thaliana; identical to SEQ ID NO: 72

SEQ ID NO: 277 - DNA, 852 bp, Arabidopsis thaliana; identical to SEQ ID NO: 75
  CDS (1)..(852)

SEQ ID NO: 278 - protein, 283 aa, Arabidopsis thaliana; identical to SEQ ID NO: 76

SEQ ID NO: 279 - DNA, 3993 bp, Arabidopsis thaliana
  CDS (1)..(3993)
atggaggtttcatctccgacgattatagtggagagagctggttcgtatgcttggatgcataagagttggagagttagggaagagtttgcgcgtactgttacatcggcgattggtcttttcgcatctacggaacttcctcttcagcgtgttatacttgctccgatacttcagatgttaaatgaccctaatcaagcagttagggaagctgctattttgtgcattgaggagatgtatatgcaaggtgggtctcaatttcgagaagagcttcaacgtcaccatcttccatcgtatatggtgaaggacattaatgctagactagaacgtattgagccacaactgcgttctacagatggccgtagtgcccaccatgttgttaatgaggtgaaggcatcaagtgtcaatcccaaaaagagcagtcccagggcaaaggctcctacgagggagaactctttatttgggggagatgccgacatcactgaaaaacccattgagccaatcaaagtgtactcagagaaggagttaatacgagaatttgagaaaattgctgcaacactcgtcccagagaaagactggtcaatgcgtatttcagctatgcggagggttgaaggacttgttgcaggaggtgcgactgattactcctgctttcgaggtctcctgaagcaacttgttggtcctttaagtactcaattagctgaccggagatctaccattgttaagcaggcctgtcatctcttgtgtctcttatcaaaagagctactgggagattttgaggcatgcgctgagacgtttattccagtgcttttcaagctggttgtgattactgtgcttgtaattgcagaatctgctgataactgcataaaaacgatgctgcgtaactgcaaagctgcccgtgtacttcctcgcatagctgaatcagcaaaacatgaccgtaatgcaattctgcgagcaagatgttgtgaatatgcattgttaacacttgaacattggcctgatgctccagaaattcaacgatcagttgatttatatgaagatctgattagatgctgtgttgcagatgctatgagtgaggtgcgggcaactgctagaatgtgctacagaatgtttgcaaaaacttggccggatcgttctcgccggttgttttcgtcctttgaccctgtcattcaaaggctaataaatgaagaagatggtggaattcataggagacacgcctcaccatctgtccgtgagagacattcccagccttcattttctcagacgtctgctccttctaacctacctggctatggaacatcagctatagtcgctatggatagaagttcaaatttatcatctggaggatctctttcttctgggttactcctttcgcaatcaaaggatgtcaataaaggttctgaacgtagtctggaaagtgtgttacaatcaagcaagcagaaggtcagtgcaattgaaagtatgctccgaggactgcatatatctgatagacaaaatcctgcagcccttcgttcaagtagtttggatctaggagttgaccctccatcgtctcgtgatcctcctttccatgctgttgctccagcatccaatagtcacacaagtagcgcagctgctgaatcaacacatagtatcaacaaaggcagtaatcgcaatggtggccttggtttgtcagatatcatcacccaaattcaagcttcaaaggactcaggaagatcatcttaccgtggcaatctgttgtccgagtctcatcctactttttcatccttgaccgctaaacggggctcagagagaaatgagagaagttctcttgaggaaagcaatgatgccagagaggtgaggcggtttatggctggtcattttgaccgacagcagatggatactgcttatagagatttgactttcagggaatcaaacgctagccatgttcccaatttccagaggccacttttgaggaagaatgtagggggaagaatgtctgcaggccggaggaggagttttgatgatagccaactgcaaattggtgacatatcaaattttgttgatggtccagcttccctgaacgaggcccttaacgacggactgaactcaagttctgattggtgtgccagagttgcagcttttaattttctccaaactctgctgcagcaaggcccaaaaggtgctcaagaagtaattcaaagttttgagaaagtaatgaaactatttctccggcatttggatgatcctcaccacaaggtcgcacaagcagcactgtcgacacttgcagatcttataccatcttgccgaaagccttttgagagctacatggaaagagtcctaccccatgtgttttcacggctaattgaccctaaagaagtagttagacaaccttgctcctcaaccttggaaattgtcagcaaaacctacagtgtggattcccttttacctgcattgcttcgttcactggatgaacagagatcaccaaaggctaaattagctgtgattgaatttgccatcaactccttcaacaggtacgctggtaaccctgaaatttcgggtaatagtggcatcttaaagttgtggctggcaaagttgacgccattaacccgcgacaaaaataccaagttgaaagaagcttccattacttgcatcatatctgtttacaatcattatgattctgcgggactgctaaattacattcttagtttgtcggttgaggagcaaaactctctgagaagagccctcaaacaatatactccccgcatcgaggtggacctgttaaactatatgcagagtaaaaaggaaaaacagagaattaagtcttatgacccatctgatgccattgggacatcatctgaggaaggatatgctggtgcctccaagaagaatatattccttggccggtattctgggggttctattgacagtgatagtggcaggaagtggagttcttcccaggagccaacaatgatcactggtggtgttggtcaaaatgtttccagtggaacccaggaaaagctgtatcagaacgttagaactgggatcagttcagctagtgatctgttgaaccccaaggattctgattacacatttgcttcagctggtcagaattcgatatcaagaactagccccaatggaagctcagaaaacatcgaaatcttggatgacttatctccaccacatttggagaaaaatggtctaaatctgacaagcgttgattccttggaaggaagacatgaaaatgaggtctcccgcgaattagatttaggtcactacatgctcacatctattaaggtcaacacaacaccggaatctggacctagcattcctcagattctacatatgatcaacgggagtgatggaagcccttcttctagcaagaaatctggactccagcaattaattgaagcctctgtagctaacgaggaatcagtttggaccaagtacttcaatcaaattttgacggttgttcttgaagtgctcgatgacgaagatttttcaatcaaagagcttgctctttcattgatttctgaaatgctaaagagccagaaagatgccatggaagactctgttgaaatagtgatcgaaaagctgcttcatgtctcaaaggacaccgttccaaaagtttccactgaagctgagcaatgtttgaccacagtcttgtcccaatacgatcctttcagatgcttaagcgttattgtcccattattggtgacggaagatgagaaaactcttgtcgcttgcataaattgtttaacgaagcttgtgggtaggctctcgcaagaggaattaatggatcaattgtcgtcttttttgcctgcggtttttgaagcatttgggagccaaagcgcggatgtccgcaagacagtggtgttctgtctagtagacatatatataatgcttgggaaagcatttttgccgtatttggaaggtctaaacagcacgcaggttcgtctagtgaccatctatgcaaaccggatctcgcaggctagaaacggtgcccctatcgacgcagacacctga

SEQ ID NO: 280 - protein, 1330 aa, Arabidopsis thaliana
MEVSSPTIIVERAGSYAWMHKSWRVREEFARTVTSAIGLFASTELPLQRVILAPILQMLNDPNQAVREAAILCIEEMYMQGGSQFREELQRHHLPSYMVKDINARLERIEPQLRSTDGRSAHHVVNEVKASSVNPKKSSPRAKAPTRENSLFGGDADITEKPIEPIKVYSEKELIREFEKIAATLVPEKDWSMRISAMRRVEGLVAGGATDYSCFRGLLKQLVGPLSTQLADRRSTIVKQACHLLCLLSKELLGDFEACAETFIPVLFKLVVITVLVIAESADNCIKTMLRNCKAARVLPRIAESAKHDRNAILRARCCEYALLTLEHWPDAPEIQRSVDLYEDLIRCCVADAMSEVRATARMCYRMFAKTWPDRSRRLFSSFDPVIQRLINEEDGGIHRRHASPSVRERHSQPSFSQTSAPSNLPGYGTSAIVAMDRSSNLSSGGSLSSGLLLSQSKDVNKGSERSLESVLQSSKQKVSAIESMLRGLHISDRQNPAALRSSSLDLGVDPPSSRDPPFHAVAPASNSHTSSAAAESTHSINKGSNRNGGLGLSDIITQIQASKDSGRSSYRGNLLSESHPTFSSLTAKRGSERNERSSLEESNDAREVRRFMAGHFDRQQMDTAYRDLTFRESNASHVPNFQRPLLRKNVGGRMSAGRRRSFDDSQLQIGDISNFVDGPASLNEALNDGLNSSSDWCARVAAFNFLQTLLQQGPKGAQEVIQSFEKVMKLFLRHLDDPHHKVAQAALSTLADLIPSCRKPFESYMERVLPHVFSRLIDPKEVVRQPCSSTLEIVSKTYSVDSLLPALLRSLDEQRSPKAKLAVIEFAINSFNRYAGNPEISGNSGILKLWLAKLTPLTRDKNTKLKEASITCIISVYNHYDSAGLLNYILSLSVEEQNSLRRALKQYTPRIEVDLLNYMQSKKEKQRIKSYDPSDAIGTSSEEGYAGASKKNIFLGRYSGGSIDSDSGRKWSSSQEPTMITGGVGQNVSSGTQEKLYQNVRTGISSASDLLNPKDSDYTFASAGQNSISRTSPNGSSENIEILDDLSPPHLEKNGLNLTSVDSLEGRHENEVSRELDLGHYMLTSIKVNTTPESGPSIPQILHMINGSDGSPSSSKKSGLQQLIEASVANEESVWTKYFNQILTVVLEVLDDEDFSIKELALSLISEMLKSQKDAMEDSVEIVIEKLLHVSKDTVPKVSTEAEQCLTTVLSQYDPFRCLSVIVPLLVTEDEKTLVACINCLTKLVGRLSQEELMDQLSSFLPAVFEAFGSQSADVRKTVVFCLVDIYIMLGKAFLPYLEGLNSTQVRLVTIYANRISQARNGAPIDADT

SEQ ID NO: 281 - protein, 412 aa, Arabidopsis thaliana; identical to SEQ ID NO: 108

SEQ ID NO: 282 - DNA, 801 bp, Oryza sativa
  CDS (1)..(801)
atggcggcgtccgccctcgactccgcctgggagggcctcaccggcagcttcaccgagttccagctcgccaccgtcgtcaccttcctcctccacgagaccgtcttcttcctctccggcctcccctccctcctcttcgagcgcttcggcctcttcgccaagtacaagatccagaagaagagcaataccccttcttaccagaatagatgtgtgctgcgtctcattctgtaccatgtctgtgtgaacttgcctgtaatggttttatcctaccctgccttcaaattcatgggcctgaggagctctcttcctctgccacactggacggttattgtttctcaagttcttttttactttgtactcgaggattttatattttattggggacatagggcactgcacaccaaatggctatacaagcatgttcacagcgttcaccatgaatatgctacaccctttggcttgacttcagaatatgcccaccctgctgaaattttgttccttgggttcgccacaattgttggtccggccctcactggtccgcacttgttcactctatggctgtggatggtgttgagggtattggagacagttgaagctcacagtggataccatttcccatggagcccatcaaatttcttgccactgtatggaggctccgactttcatgactatcatcaccgtgtgctctacaccaaatcaggaaactacgcctctacttttgtttacatggactggctgtttggcacggacaaggattaccgcaatgccaaggctatcgaggagaaagacgggaagcatttgtaa

SEQ ID NO: 283 - protein, 266 aa, Oryza sativa
MAASALDSAWEGLTGSFTEFQLATVVTFLLHETVFFLSGLPSLLFERFGLFAKYKIQKKSNTPSYQNRCVLRLILYHVCVNLPVMVLSYPAFKFMGLRSSLPLPHWTVIVSQVLFYFVLEDFIFYWGHRALHTKWLYKHVHSVHHEYATPFGLTSEYAHPAEILFLGFATIVGPALTGPHLFTLWLWMVLRVLETVEAHSGYHFPWSPSNFLPLYGGSDFHDYHHRVLYTKSGNYASTFVYMDWLFGTDKDYRNAKAIEEKDGKHL

SEQ ID NO: 284 - DNA, 21 bp, Artificial Sequence
  primer LB1
tgacgccatttcgccttttca

SEQ ID NO: 285 - DNA, 27 bp, Artificial Sequence
  primer LB2
cagaaatggataaatagccttgcttcc

SEQ ID NO: 286 - DNA, 21 bp, Artificial Sequence
  primer RB4-2
agctggcgtaatagcgaagag

SEQ ID NO: 287 - DNA, 23 bp, Artificial Sequence
  primer RB1-2
caacttaatcgccttgcagcaca

SEQ ID NO: 288 - DNA, 23 bp, Artificial Sequence
  primer LB3
ccaatacattacactagcatctg

SEQ ID NO: 289 - DNA, 18 bp, Artificial Sequence
  primer LB5
aatgctagagcagcttga

SEQ ID NO: 290 - DNA, 22 bp, Artificial Sequence
  primer LBseq
caatacattacactagcatctg

SEQ ID NO: 291 - DNA, 18 bp, Artificial Sequence
  primer RBseq
agaggcccgcaccgatcg

SEQ ID NO: 292 - protein, 16 aa, Artificial Sequence
  primer ADP3
WGTGNAGWANCANAGA

SEQ ID NO: 293 - protein, 16 aa, Artificial Sequence
  primer ADP6
AGWGNAGWANCANAGA

SEQ ID NO: 294 - protein, 16 aa, Artificial Sequence
  primer ADP8
NTGCGASWGANWAGAA
